United States Patent Application Publication US 2005/0064454 A1 - sequence listing, part 3

SEQ ID NO: 6040 - DNA, 302250 bp, Homo sapiens
gatcagaaaatatagctgtggcacatgctggcaattttgaggtaaaatgttatatgatgtttggtaccctttagttacactgatttgtttaatgaattaccattaagagatactcaggtctttgtcatagattctcttaaccacagcagtttctcttttaggttcagagcacagagggagaagcacctcacgtgccagccacttgccagctaggtcttgccaagtcaaaaagaggtaagtggagcctctgcccactagttccctgtaattactctgtgttgtcagctgggagggaaaggggtttatctatcagtgtgcatagcattaagtgtgaaaagattagggtacaggttggggtgtgttatcattcatctaattgttgtgggggttttatgcaggggagacttttatgcttataaactaatactagattgtttatcctgcaatgacctcattaaatatttctgggtgctttaaatattattcagctctgcacatgcacagaaacagattaagactacttttacattgttatgactaaaaactcttatgttctctgtctgggtgttctttatgcaaatacatcttgtaagtagaatatgtcagatgtaactggcaaaaactcacaatagttaaaccaagttaaataaattcaaagtgtagatcaaaggtgagtagccccagatgccactcttctcttgtatcgttaattattgactagagaacctttgcatccattccccacacttttgacttggaactagagaataccatctgacttcagatttaccaagcatttgatagttagagaaagaggaagacgttaaatgaccactgaaggtaggactgtttatttttaaaactttacacatagcaagccaccctgcttttaaaaaaaaaaaaaacaaaaaaacaaaaatgtgtatgtatgtcctagaataggaaattacatgtttgtcctcctgatctctgaaaatttctcctgagggacagtttgcatgtgacttttctttcattgtggtatggtgttaaagaataggggcacttagtcactgcagctctagtcagacacaaaatgaactttctcattggcttttctttctttcttaagaccataaataattgcatctgttactgaggtgtaaaatgatgcgtaagactttgtcttaggtggataggcaagggccatattgggcaaaacaacttgtcatgcaccacagaagaataaaacagaagagtaaaatagttttaagttcttttagggaaactgtgatcgatggggaaggtgtattcagtttagggtcaaatctgagtttcttcctctcacagtcttcagtctgtttgtaataacataagcaaaactattaacatatttgtatataagtatcttataaagaacaataaagagcttcatgtatgcactaatgagaaagggggacgggaaacagcaacattttacccattctcacaagtttaatggaaacagtgcatgacttcactagtaggactttacaacttgaacttctctaatctcaggtgtaaggactctctcctgtaccttagaaagttttagtggctcagctcatgtcctggcctagtgtttagtggacttcttaggagcctaatactattgttatagaagacacatgtattttcttaaaaatctagaaagatatatgaattttattcagtttctttgatactaagcagatggtttccatgttttgtgttttcacacttaaatgcttctaacttttaaatttaggtaatattcaacatcttcagaactgaggattaatcctttttagatctaaatttctctagtaaagaactgtggtttcattttataagatttctttattttattttatgagtattttgtatatatgtctgtgtacctggtgcccatagaggccagaagatgttgcatccctagaactggagttttgtttgcaaaccactgtgtgggtgctgggaattgaactcaggtcctctgcaaaaacaaatgttcttaatgttgagccatctcttcagcccaagagaactatgccttttatggaacagaaatgtttacctaaagaccttagattggggtatttagactttaagaatgtttgtttatttttaggcaaggcctttctctgtagctaaggttggccttaaacttaagctcttcttgtcagtctctctgggattgtagatgaccacagcagtgcctgtgtgctttgtagctgagggaatactttcctaccttcctctgaagtagccccaggcaatggagggctctgatcccaatccccagaggagaatagttactgctttgcccaatgaagcaagggagaaacttaagctctttattctgttcatttccccatacccactctgaagcctacagtctccattgccattcaaactgtgtgagtcacgtgctgctcagttttgagggaaacccgctcagaccttattctcctgcacattcaacagatctttaaaggaacagtctgacctagtcattctgacttctctgtactccactgaagttcccttttcccaaccaaataggcactttaacttgtagatcatttgtatgactgcttaattgttgtgttgagaattatgactgagtcattaagcaaacattgccatgttgttctacataccagaacattaagaataagtaaagttcccaatttcatgggctcatagttataaaacacaacaaaacatagcaaagacatggaagcaccagtacagtgacaagtgctctgacatacattgttaattcatttttgaatgaatgtaataccccattagaactggcagtaatggcttgttaaaattcagtttgataattattccagcatttctaggcttggtaaggatatggaacacttccttagctcattatagagctttattaatgtcatgacactgttgcagaattattctcagttttcaatagggtcaaagatgcaagtaaactttaatttcagatttatatagtcttattatctggttcagattatttggtaagcaccgtatttagcctgttgcttctgaagttctgcaaaagtctcctgtccctcagatccttgcaaatggactagctataatgtcccccttatggtagctctactataaatagaatgtcatcttacttgctgtacttagcatctttctcaaagcccatatacatattaatgtagttagaaattagggctttgtgacgtaacagtaaacatgttttacaatgttagaatgtcatatattaattgaatctttgactttggcgtaattgttatgaaagaattatttcttaatatgaatacttgcatcattagaaacaccagtgatatttaaatacccttgcatttcaaatgatttagtttattgcccttaatttcatactaagaagatacaaagcttttttaatgcattctgcatataaacttctaattttacttaactatcttttatagatttacataatataattttttatttcatccatttttttctctatggtaagatttaattggatttgccaaatacatcaccactggagcctaattagcaagtgaatactagtcaattttctgctagaaaatctgatccagcttttatttgaacttgagttacttaccatgctttggagccatgatttttcattaagttctttgtgatgctttattggggatcaaatctgtgataatgttgctgcccttgcaggcctacacagtggttttgtttaacaccatgtttctcctgacagatcatctgctgcgaactgcaagtcagcattccgacagcagcggctttgctgaggactctgcagacttcctttccctcaataatcttcaggtactactagttcctcttttaataggaactttcattaacccctttgtgtcgtactgcaaggtggtctgtcaaatggttataggaataaaatgtctggaatgtagatcttggctaagtatttgactataaatttcagattttactcattcatgatctgtgagtatttttttaaaaatctaagttttgtattactggtgactaaattactttggtcattaaattgcttggcctgatgttttttcttatttgcttattttagtacatttcagccttttataataatgtgtttattggaaaactcatattcctgctagttacagggacatctgtgagaagttaggctgtgttaggaaacccagaaaacaagtgcttctttattcttgcagaactgctggttggttggtatggagagtcacagaatgcacagaaaagctgtttgaagtatttttaataaaatttgaaatatggggtaaaaagaataaagagctttctagaaacatggcatttgaagggtaaatgggcaagaaactcactcagaaagacccagaaagagtcattatgggagaggaggagacacaagtgtccactccgacctgaggtagtggcaaccaataacagctagcgtaggagtcatttttctttggagttctggcactagtaggttgcccatgttccagtgggtgaccctacacccccatacatataggtaagaatggtttgcctcagtgtgttatcaagataaaaaacaaaaactaggttatgaaggtgggagggggacatgctgtgtgggaatcttaggggagttggagtggaaaaatggaatgcagtcgtgatcataattcattgtgctcatgcataatattcttaagagactaaatttaaaagctgcttaaaaccattggagagaattcttcaagttaaaatggaaaaatgataatcaataatatgaagcatggtataaaacttgttaataaaggtaaataggtatctattccccatgttgtaattccttgaaatttgtagctttataatgctgcaaatgtggcttttgttctgtagaaatctttgaatttcagtatttaattgtgttttattatataggatagtaacagtggatgcagtgtggtgtgtgttcctggaagtgaatgggtagtactctagagtatattgtgtgtcagtattttatggatattgtgtttcacattccattccatctgcagagtagccattgtctttcctctatttaaccaattttgttttccatttatagtattcaataaaatacataacactaaatattttattaataaaataagatttattttggataattttgctcacctataatttagtataagagttttgagcatacttaagatagaatgggataagatgatacttgactggctatatatattaaatacatttaaaatgaataatggaatgtgtaaaacaaaagtgggcaatgggaagagggtatgtagttgtgacgaaataaacaaggtaaaggcagcctgagtcatatgtcaatgatgaagaaggaaaggaagaacctttcaagaaaggatgactgcttccttgaagaggtccctatgtcttagtgtgggagggaagttgttcagcttagggaagggaccacagtgtaagaagagtttgatccagaagaatctgggatgaaactgtggagagacccctggtcctgaagccacatgagcacaaacacagcatggttagaggtgaaaaaagaatattattcctttcagaatgaagagaaggtgatgagaactagggaaattagaggtattggaagagaacattaagaaagttttgggcaattctgtgagtcagtgtcaaatgttggaaaggaaatttaagaaaaatagatcttagacaatcttgatgagtaagtggggagggagatggtaaaaaccagaacaatcacaagaggagaccgttgagtccagacacatcttgtctgtagccttttgtcagtggtatctctctgactttattcccaatctcccaaatgttttctatttcaggttcatgaatccctgcaagccatggggagtagtgctgacagctgtgacagtgagacaactgtcacatcatttggtgaagaccatgtgactcctacaatgcaagaccagccttattttaatgagtcagaggaggagtcccgtgcccctgttgagaaaggaaaaacaaaggtagtttctgacaaaagaagagcaagcaaccaagatttccctccatgtgagactgcagagaatactggaaacaaagagtccatgaggggtccaggtgaccctgagcctcagcttattgaaatggaggaggctgcatctccagcagcagttggagaggtcctgagggaaggtagtggagacagtgatgcagagagaagcagtgaatgtgaatttgcccagtataccacacatcatattctcaaatccttggcttccattgaagctcagtgcagtggtatgagctctgaaaagaaaaccgtgtttccctcttctgtggatagagtgaataccgccttgcagagagctcaaatgaaggtttgcagtctgtctggtcaacgagtagggcgtagcttaataaaatcaaaggatctgttgaaacaaaggtacttgcttgcaaaagctggctatcccctaagaaggtctcagtctttgccgaccaccttactgagcccagtaagggttgtgtcttctgtcaatgtacggctatctccaggaaaagagaccaggtgcagcccaccttccttcacctacaagtacacacctgaagaggaacaagaattggaaaagcaagtgactgaacaggatggtcagtctgtggttaaatctaccatcttcatccccccatcctctgggaagaaagcagaagcccctcacagtgaggagacacgactggacgactgccaccatggacggcttcccccttgtccacagtttgctgcaatatcccagtccacatgttcccttcactctgtccatgagtggcaggacaggcccctgtgtgaacacatgagaaccctgagtgctcacagcgtccccaacatatcaggtgcttcatgtagcgccttctcttctccttttgggtgtccctattcacatagacatgctgcccacccatacagggcatgccctgtgaatcctccttccgccatagagatgcagttgcgaagagtgttgcacgatattagaaactcactacagaatctttcacaggtaagataaaaaggtctttatattttattgctctggattcttcttaattcaccaggaaattagaactgagcggacaaaccacctcaacttattttcttatgtgtatgaacccatctccaccagctctcctagacacatcccttctgtgttgttggggaaaactgtaactaatcctgaacagttcatttctgttctgagagtctcctttttgtagaagcagaattgtttcatggtgttttccctattcatcctctccttcattctccttgtctggaacctgagagtgtcctgttaaaagtatcttccagtcctcctccttttctctgccattcggtttgtgttaatcacccctaactatctaagtcttttctttggcttcctccactggcacgatgttctcctggttcttgtagctctctgactaggctttcctcttcacccgctgacctctgatgctggcctcctggcacagaattagtctgtttccatgggctcaaaactggaaccactccaaagagaatcaggtaaagtgtgaattcccgaatgcatgccatctgttacagtgaaatagtggatgggaagcaactttggtaaaaatcaaagttgtagcttttcaaataataatgagatccaccttttaagtatcatctttgttccactgataattgtccctaattggtttatagtctgaccagaacatacctgtttctcattccctgtaaaacatagctctggctgtgactgagttgctcagcattttcactgtacttctgtgaggctgggaattttcagagccctctatctgtgcctctgtggtgcgcctttccaggcctgcttctccagctgtggtttgttggccatgaatgccccatcactaactcagttgatgaatctccccaccccatacctcacttgagcagagagatgattctctgtagtctccttgtgtagatgatactgagcagcagggcatacatcgttcttgctatctgtgaagttagatgatctacacatatcacttgggtgggtgggtgctttcattgttgccgctttccagctgcagggctctgtcttcgctgttctttgcacgaactgcaaaacctcagcggtgtctaaagctcactttagctgtcaccactacaggcatatttaccaactgaatttttgcttctttccatgagctagcctcctaccgcatattcacatacactctcacgcacactcatatccactcacacatattctttcacacacatgcacactcatacacacatctacacactctcaacatccacacatgctaaaacacattgcaaactcatacattcacttagactcacacactcatacactcacaaacacactcatctcacacatatactcacatacattcatttgtacagttcttttttcaactttattttctttacattgtgagggtaaggcaactttttgtcttctctgcatttaacagtagagtatgtcccactgagagtgtatgtgatggccactggctgctttctgcagccacaccagtgtggtgcaatgtcctgttacatttgcttccacatctccgagtctcagtttggcttttttacttactttctcaagacaagaaggaagttctttgaaaacacacacacatatacgcacatgcacatgcacacgcacacattttcctttgcttcttccttctcccaaacagagtcatttggagctggaatatttaagaatcataggtggaattagagattaatttcctttgttgctgattatagtataaaatgttgctgggtttgatttagcttaaaaaaataataatgcatgccttatgttagccttaacaccgtagagaacatggtggtagtcactttgacatggcttttaatcctgtgtcatctgtttgaagtatccaatgatgagaggacctgatcttgctgctgcttcctacagtactcagaaatcgtctgttctacctctttatgaagtaagttccctccagaatcttttagttgcaaagtaattagtgtgatttagaagtgtaatcttgttacgttgcatttcagaatacctatcaggagcttcaagttgtgaggcggagcctgaatctgttcagaacgcagatgatggacttggagttggccatgttacggcagcaaactgtggtgtacccccatatgacagaggaggacaggtaagggctcattggtgttggtgcagtcagagccttttctttagagagcaggccttcagtgtaggttcttatgcagcttcgttcacactctgtgaactctgtgttaagtgaagcaatgtagataagaaacaggtccagggagttctctaagttatgtctgtttctcccatgtgccaagcaagactctcagtagtctgctttccagagagtcaagagtgcatgggatcaaagacctagtcatggcctggagagatggctcagtggttaagaacactgactgctcttccagaggtccccggggtcatttcccagcacccatgttgcagcttacaactgtttgtatataattccagtttcaggggattcagcaccttcacatagacatacatacaagtaaaacacaagtgcacatgaaataaaaataaataaatatttttttttttatttttttacagaggaccttgtcattacctcagggttgcttctgtctgaatttatagaattggaattttttgtaaaccttttgtaatttcatagtattcaaagtatagtgactagaaatcacttggctacatttttccaaagttatgcttgtcacaatctgataggtatgaagttgatcagctgcagggtttgcggaactctgtgcgaatggaactacaggacctggagatgcagctggaggagcgtctgctgggcctggacgagcagctccgtgcagtccgggtgccttcaccttttcgatcctctgtgctcctggtatgctgtggggtccagagtctgaagtagggttgttcataatgtgatttaggaaaggggacttagtcaaccatttgctttaatggctttaggaccattcataatgttcaagtagcttttatactactcactggagattttgccctgattaccttcatactatgcacactagttttttttttttttttttttttttttttttttttgtacgaagtgtgataagtttatatttagtatatttagaaatacactgaaaattttaaggataaaattttcagtaatagaaaaagcaaaggtcaacatagaagttgtttttgaaggaaaagttttagtggattaaaatatgagtactttaagttcatatccctgcttgtaactccaaagaacatactatattactccttttatccctgcccccttgtttaaataaataaccgatccctttttaatgttccctttgttttcattttagttcttttctattccttgtgggtttttggttttatatttttgtggttttgatgctgaagattgaacctgagacctcccctaggccaatgcatgccctatccactggcagagcctccagtgccttctttgtctccttaaagaacaaagtgtgatatcctcatgtgatccatttatacaataagaataatgaaaggacactgtccttaggttgtgccatttctccatatttctaatgtgctttcccatggaattggagcttcaccattattatattcttatttttgccaatatctttccagttataaaatatgttggtttgaaattttgaattttatcctactatttcatgtttgattttgttaaaaataaatggctttatgtgtgtgtttggacatatacaaagaagaatgtgtacacacagataaaataatattcctaatcattatgaatgcaggcttccatggttttgacccatcattctgagaaatgtgttggtgggaatagagaaccagaaagtctgtagagctgtgataatgatacatttgatgaaattcatggtagttggctacagtgttagagacataaagtgatattttgaggaaatcagtagccaagtaatgttagtatgaagcatttgcagtttgagaaaatgtataccagtgtaagcctgtgtgttgtacttaccttttcaggggatgtgttccagtagaagtgctgataacttatcatgcccgtctccactgaatgtcatggaacctgtaagctctatgctcctcagtccctggggaaggaagggtgctataccatctcacaagcatgcagttttcccagttcctacaaaaagcatgcttgggttaaatacagaatttaagaagttaaattgattggaagtcagtttgaaatccagtgccattttgggccactagaaagctagcttcatttgcaataagtttgtgtttataacctaaaggagataatgcaccatagaaacattcatttatattccacagagtcctttcatgtcagaccatggtccctataggatctgtagaatgacttatgaattcatcattactttttagactcattggcaaagccttctgagtaactgttttattgttcattgattactcctcaatggaattcagactctgtatattaactaataaaatttcacttcactgtgtttcctacattcccaagttatggcttgagattactatgaatttaaattttgttttgtaaatgaaattgaccagtttataagttaatgaaatagaattatgcctttagaaatccatgtgattgaggacagtaagcatagctaggaatactgtttttagccttctgagttactagtctttatctaaagaataattttgttggcctccaggtcacagaactgatacgggagcagtcatatctgaagtccgagttgggcctaggacttggagagatggggttcgaaattcctcctggagaaagctcagagtccgttttctctcaggctacatcagagtcctcctccgtctgttccagcccctcccacaacaatagaagatccagggggccttctggcaactcaggcagcaaacccagagcccgcttagtggcaagaaagaagatattccgagcctctgtggccctgacaccaactgccccctctagaacaggctctgtgcagacacctccagatctcgagagttctgaggaagctggagcagctgaagaagcctcacaggttgtgggacttacatctcatgtggaggaagagcaagaagacctcccactgatgccagctgctgaggaaatgcatcggaacgtggagcaggatgagttgcagcaagtcatacgagaggtaggtacagtctgggtttgtgtcattacttacagtgggtgtcctggtagatttgactcagatactgcttatttgtaagactgatttcactgtatatagtcatttgcagaaagcttttgattagcgtttccattgactatgcatttctgcagattttattctgcagggtaatatactctagtggaaaagttgttcatgaagtttgaaggagggagagccctttagacctctcattcccacatgtgtgaaataaagaattacaattagacttcttccagaagctgtcatcttataaaattccaattggcatgagaaaaaggaggagattcatgattgtgaagaatttgttctttttcctttggagaagtatagaaattgtatgatttgttcataggttgaaacatagtatgaaaatggggtatatcctggatgacaacagcatggaaacctaaccataattctgggttactgaagaaatcacagacatatatgaaggaaatgtgtcagaatcaaaagataactaagaaaatgtgtagaatgactgaactttccttcgctgtgtcaaaatgccctaaagaacaagctaaaagagaaagtttgtttctgttggtgctttcagagatcccttatcccttcttgcatgtgaggatctagggaaaaggcagctgtctatgaactagggagcaggactccaccagacatgaaatctgccagcaccttgatcttggacttcccaacctccagaatgtgagaaataaagttgcgttgtctataagccacccagtctatcactatttttgttatggaagcccaaacggactaagacaatggcacgaggcatttgtcaaaacccatagatctttacagcacaaagagtgaagcttaatgtatgtaaagtttaaaagtaacttaagaggttggagaatcacgggacggcaggtagaatgttccacacacacacacacacacacacacacctagttgtataatagatatatgaaaccaccacaatgaagcaagtggggggaaaagttaacacattttgtactccatcaaagaaatatatattttataaagtttaagttggccagataagtgtgtaacatagttgaacatttgataatcatttatttaattttttagatatgaaaactatcggctttttgttttaaaaaaatccttatcttttaaaaatgcatattaagttatttagagatgaaatggtctaatgccttagatttactccacgttattccagcagctcatatgcaggtaggcgagtgtttaactggaaccagatttgctgtgtatttaaagatgttcatgctcggtatcaagtatcctgggttcattatattcgttcctgttattctgtatgtgtgaaggctttccctaataaaacttttttatcataaatatgccattaaaagtgaaatcctaaatgaaactgaccactttgtagaaataaaataaatcagtaaccaaactgatccaaagaggaaaagaaaactttaactatacaacagaaactgtacaatattcaaagctcaagccaccctcaaacattccaggttagacagctttggaggccaattttaccaaatgatcagggaaaactaaccaccgccttatatcaactcttccagaacatacaaaagactgacaattgttcagttcattctcccaggctagccctcctggatttaaaaaccagatgaggaccacatacctcccctgatggaaaaagaacacatcaagtaagctctcttacacagcagtaaatatcctacataaattagtagtacattaaacgaataaacaggctctgcccaaggaaataaaatatgatttaacattagaaaaaacatctgtttcattgtgattccttacatacaaaatggaagagaaaaaaatttgatcctgccaacgggtacagaaaaagctttttaaataaatttaatatgaattcatggtaaaaaagaaaatatttaggcaacctatactgaaagagaacttccatttcctaaaatcaacagcaaacatacttaaatgtcaaatgttcgaagaattatcattcaagtcaggaacgagaagtagatgtagcctattatctctacatttgaaatcaggattgagacacaaagagctgtaagtaccgaaatgagtgagtggtatgaacattggaaaaacatgtagtgtttagtgataataccattatcgatcttgaaaattcaaaggaaaaggtatgcggaatattcaagtgcatcggccttcagaacgaggtgtgcaacagattactacagcaaaatcaaaatcttcacctcacgaaagcaataactaactacaacaattgatagacaatatgccacttgcaatagcaacaaaatccaagaattacctgaatagaagcctaataaaaatgtataagttgtttatagaggcaactaccgaagtatactgacatattcaggaaaaaagagcttgaaatccatagaggagtataacatattcattcacggggaacacaacagtgtaaaaatgtaaactcagcttaaattatttacaatttagtgccttacctgtagccgccgacattacaagcaaatttgggctgctgtgctctgcttcccaaatcaaccctgtaaatttatagaatggaaacagaaagtaaaacaccagtatcagcaagaaaatctacacaacaaaacagggaaagcccagagtgagactggagactgtgttgagctggtacttgtgtgtgacacttgcagtgtctgttggagggggttagcggcagagatgttggggaggtttgtagcctgcctagacggcagatgaaagaatgggtagaataaaagttttgaattttccacttcacttcattgcacaatctgaggcagcccctgaaaacacgatgccaagagccctaggtaatagcagtgtccaccaggaaaattgggtttgttaaggcagcatggctccagagttctgctaataacaacctgaaaccaacagagtgggagaggaattatgttttttaaaaaaattctttcaacagaacacaaagactggaatggaagtagactaggatatcagagtgaatcatgcatactaagggtaggtgttagttcatagaaataaatatatatattgctacctacatatatacttagaagatatgtaaaccgtatttcttcaattcagagaataaatcatttaggaccaaaggtttgccaagtgtagctctggctggggaggagcccccgtgggaaggtgtgcgtcttctcccagaggtcactatcatcgcgggagctcctgccctgcagggagcacctggcctggcacccgcagccattctctacaaggggtgcagatgcgcagatgcgcagatgctcagaggtgacagaaacagagcatctcccacccattccttcatcaaacagccaggagtgaggaagaggaccctcctgagtgaggactgaggatccaccctcacccacatagtgggaccacagaatccagctcagcccctcttgtcagccctggtacacactggcaatgatctcaccccgagcacacccctccccccaatgccacttcgggccgactcagagtcagagacttggtctgaggggagcaaacacaatcggcagaggatggcggtccaggctcagtctggcatccaagtcaggaccttgagggatgaccaaaggcccctcccacccccaactcccccgaccccaccaggatctacagcctcaggatccccgtcccaatccctacccctacaccaacaccatcttcatgcttacccccacccccccatccagatccccatccgggcagaatccggttccacccttgccgtgaacccagggaagtcacgggcccggatgtgacgccactgacttgcgcattggaggtcagaggacagcgagattctcgccctgagcaacggcctgacgtcggcggagggaagcaggcgcaggctccgtgaggaggcaaggtaagacgccgagggaggactgaggcgggcctcaccccagacagagggcccccaataatccagcgctgcctctgctgccgggcctggaccaccctgcaggggaagacttctcaggctgagtcgccaccacctcaccccgccaccccccgccgctttaaccgcagggaactctggcgtaagagctttgtgtgaccagggcagggctggttagaagtgctcagggcccagactcagccaggaatcaaggtcaggaccccaagaggggactgagggcaacccaccccctaccctcactaccaatcccatcccccaacaccaaccccacccccatccctcaaacaccaaccccacccccaaaccccattcccatctcctcccccaccaccatcctggcagaatccgggctttgcccctgcaatcaacccacggaagctccgggaatggcggccaagcacgcggatcctgacgttcacatgtacggctaagggagggaaggggttgggtctcgtgagtatggcctttgggatgcagaggaagggcccaggccctcctggaagacagtggagtccttaggggacccagcatgccaggacagggggcccactgtacccctgtctcaaactgagccaccttttcattcagccgcgggaatcctagggatgcagacccacttcagcagggggttggggcccagccctgcgaggagtcaaggggaggaagaagagggaggactgaggggaccttggagtccagatcagtggcaaccttgggctgggggatcctgggcacagtggccgaatgtgccccgtgctcattgcaccttcagggtgacagagagttgagggctgtggtctgagggctgggacttcaggtcagcagagggaggaatcccaggatctgccggacccaaggtgtgcccccttcatgaggactggggatacccccggcccagaaagaagggatgccacagagtctggccgtcccttgttcttagctctgggggaacctgatcagggatggccctaagtgacaatctcatttgtaccacaggcaggaggttggggaaccctcagggagataaggtgttggtgtaaagaggagctgtctgctcatttcagggggttgggggttgagaaagggcagtccctggcaggagtaaagatgagtaacccacaggaggccatcataacgttcaccctagaaccaaaggggtcagccctggacaacgcacgtgggggtaacaggatgtggcccctcctcacttctgtttccagatctcagggagttgatgaccttgttttcagaaggtgactcaggtcaacacaggggcccccatctggtcgacagatgcagtggttctaggatctgccaagcatccaggtggagagcctgaggtaggattgagggtactcctgggccagaatgcagacagggggccccatagaaatctgccctgcccctgcggttacttcagagaccctgggcagggctgtcagctgaagtccctccattatcctgggatctttgatgtcagggaaggggaggccttggtctgaaggggctggagtcaggtcagtagagggagggtctcaggccctgccaggagtggacgtgaggaccaagcggactcgtcacccaggacacctggactccaatgaatttggacatctctcgttgtccttcgcgggaggacctggtcacgtatggccagatgtgggtcccctcatctccttctgtaccatatcagggatgtgagttcttgacatgagagattctcaagccagcaaaagggtgggattaggccctacaaggagaaaggtgagggccctgagtgagcacagaggggaccctccacccaagtagagtggggacctcacggagtctggccaaccctgctgagacttctgggaatccgtggctgtgcttgcagtctgcacactgaaggcccgtgcattcctctcccaggaatcaggagctccaggaaccaggcagtgaggccttggtctgagtcagtgtcctcaggtcacagagcagaggggacgcagacagtgccaacactgaaggtttgcctggaatgcacaccaagggccccacccgcccagaacaaatgggactccagagggcctggcctcaccctccctattctcagtcctgcagcctgagcatgtgctggccggctgtaccctgaggtgccctcccacttcctccttcaggttctgagggggacaggctgacaagtaggacccgaggcactggaggagcattgaaggagaagatctgtaagtaagcctttgtcagagcctccaaggttcagttcagttctcacctaaggcctcacacacgctccttctctccccaggcctgtgggtcttcattgcccagctcctgcccgcactcctgcctgctgccctgaccagagtcatcatgcctcttgagcagaggagtcagcactgcaagcctgaagaaggccttgaggcccgaggagaggccctgggcctggtgggtgcgcaggctcctgctactgaggagcagcagaccgcttcttcctcttctactctagtggaagttaccctgggggaggtgcctgctgccgactcaccgagtcctccccacagtcctcagggagcctccagcttctcgactaccatcaactacactctttggagacaatccgatgagggctccagcaaccaagaagaggaggggccaagaatgtttcccgacctggagtccgagttccaagcagcaatcagtaggaagatggttgagttggttcattttctgctcctcaagtatcgagccagggagccggtcacaaaggcagaaatgctggagagtgtcctcagaaattgccaggacttctttcccgtgatcttcagcaaagcctccgagtacttgcagctggtctttggcatcgaggtggtggaagtggtccccatcagccacttgtacatccttgtcacctgcctgggcctctcctacgatggcctgctgggcgacaatcaggtcatgcccaagacaggcctcctgataatcgtcctggccataatcgcaatagagggcgactgtgcccctgaggagaaaatctgggaggagctgagtatgttggaggtgtttgaggggagggaggacagtgtcttcgcacatcccaggaagctgctcatgcaagatctggtgcaggaaaactacctggagtaccggcaggtgcccggcagtgatcctgcatgctacgagttcctgtggggtccaagggccctcattgaaaccagctatgtgaaagtcctgcaccatacactaaagatcggtggagaacctcacatttcctacccacccctgcatgaacgggctttgagagagggagaagagtgagtctcagcacatgttgcagccagggccagtgggagggggtctgggccagtgcaccttccagggccccatccattagcttccactgcctcgtgtgatatgaggcccattcctgcctctttgaagagagcagtcagcattcttagcagtgagtttctgttctgttggatgactttgagatttatctttgtttcctgttggaattgttcaaatgttccttttaacaaatggttggatgaacttcagcatccaagtttatgaatgacagtagtcacacatagtgctgtttatatagtttaggggtaagagtcctgttttttattcagattgggaaatccattccattttgtgagttgtcacataataacagcagtggaatatgtatttgcctatattgtgaacgaattagcagtaaaatacatgatacaaggaactcaaaagatagttaattcttgccttatacctcagtctattatgtaaaattaaaaatatgtgtatgtttttgcttctttgagaatgcaaaagaaattaaatctgaataaataattcttcctgttcactggctcatttctttaccattcactcagcatctgctctgtggaaggccctggtagtagtggggattctaaggtaagccagactcacgtctacccatagggtcatagagtctaggagctgcagtcatgtaattaaggtggcgagaagtcctctaggatgtagtggaaatgtaagacaggggtgagggtgtggggttccaggtgagagtggtgagtataaatgccctgagctggggcaatttgggatctgggaacctgcagttccttctgaaggagctgattctaatgatgcccggtgggtccagggccagattctcagagggtgagagaaaagcctggaatggaatgctaccctgagcagtttctttaggatggggatgaagagagaggaatctccacctggggctggaatggaaggtgtcctgtgtttttgcccaatgctgttgaacacagcccaagatctaggtgatggacacccatcatctgcaagggtttcctgagcgataaggctgaatttcccaggaagggtgacccagaagccactggccaggtgcttttctttttttttttttttttttttttgagacggagtctcgctctgtcgcccaggctggagtgcagtggcgggatctcggctcactgcaagctccgcctcccgggttcacgccattctcctgcctcagcctcccaagtagctgggactacaggcgcccgccactacgcccggctaattttttttgtatttttagtagagacggggtttcaccgttttagccgggatggtctcgatctcctgacctcgtgatccgcccgcctcggcctcccaaagtgctgggattacaggcgtgagccaccgcgcccggccggccaggtgcttttctgccaggcagggagagccagagctgactccattaaaaaggcattctaactaggttatctcaagtgcaatttgaccaattgtaagcacgggctagattctggatggtaacaaagtggatgaatatagtggtttggatgggaaagcagctgggagagagggaaggagttggtctttgactcacattctaggagctttgagctgcacctggctgggcaaaactcccgcacaaccaaattttgaagtgcattctctaagaggaaatacttaactgaattttatggaagaagcttctgtttggggctaattattccatgtcctattgagctgtatgttctctgataagtcctggagaacaacgacaacaacaacaaaatcccagtgttcgggcctcgggttaaagcatattggaaataacagccatccgccatttgtgaaacttccaatttacaccaggcccggagccaggtggttcacctgcgttgcatacactccgactgtcctactagacaggccttatcacatctgcttacagatgaagaatccagggcttacagagcttgtgaattgggatataagaacagggtatttcctgggtatttctcagtatcacgtggctagtaaggaacagggctggaaccagacccctggcatgaattcctttagagcccatgctgtccccacttctccgagcccgaggctgacctcctgacagcgacttcatttttcttctcagcactgcaccatgtctctcaggtgacaaaaagaaggaccttgaggccagcataatgaagcaggcctggagaacgcgacagtgagaatcaaacaccatttggggctggtgtgcgctaggttccttgagagctaactctgcccagttgtgggcatttctctgcagccccagcactttcagaattacagcacatttccccgggtcacttccatgtgtcctgtctgactctggaacctatagggcctgctgatcagctcctcactgatcctcacagaacagcccagaatcccctgctcacctcctgacagggagcattccttctcatagtagaagtcctctggctgttccgtctctcacccaggaagccatatgatgtcaaaaacccttttgtataaaaactcacacggggacagtgacgcttagacacttggttaccactctggttgtcttcaacacactctctaatcgttttctgaatgggctgaggagtctgattcgccatattatctaagggttcttgtgtgatgtcaccctgaagttagagggatttggaaccaccttgatacttgaaatcggactttcacagggcgtccttttggaattcgcctctgaatacatgcacagataaatgatcaaagagcaaaccgtctctcatgagtattagatgagaaaaaccttgggaaaccccagtggaacaaacatctacttactgaggctgaattcctaaatttctggagtcctccaggagtttaaaaactataccttgaaaacatgtcaactctaatgaaagaggaataattaagcagccttctgtttcttgtctgtttacctgctccacaggaaaatactggccttcagcgtgcctacctcgacaggtgtacaggcgtgtggagggtagcagaaattcacaggttaacattttgaccgggaatcaaatggaggaacaattctcagcctactaaggatttaaaggatattacaaaggaaagccttcctgctgagactttcaagattcttgaacagttagttgtgatcgtatgtttgaaaacatcagtcacatatttgacactggaaaacgctggagaacttcaaggtaaatttggccttctcagaaactcctcctagaaatgagaagggtagtataataccaaatgatcatagttgctttttgttgagcacccactatgtaacagtttatggggaagggtatagtactcacccacattttgtctctgtctccttcctggacacatgggaacagtaaagtccttgcagttaggatcatgtgacttttcctttacaccaatacaggagcagaagcattgtttgtcaaatccaggcatttgagagccagtgtgccatttccatgctttctctccgctttcaacagcaaacatggcagcttcatcttgagatgacggaatcaaaaggtggaagcagcttggatccctgggtcatgtgagagtggagagcccctgccaaaccgcatcagaacttatttgcacataaaataaacttctgttgtgtcaagccattcatggttgttctgttgcatcagctagcaattacttaaactgacacggctagtatttctgttgtcagtattaaatattttttatttaaaatgtagtttggtatatattcttatttcaaaaatgatagaaatgtagataattcacaattttttttttacaaagctcctccacagttaacaacaccccccgcccccccgcagaggtcaccacaattaacaatgttgtgtattattttactgctgactctaggcttttcactgacaaactataacaatatattatttttattcaatatacaagaacaatgacatacatactgatctgcttttatcactttataaaatgcatgtaggatctttcgacaacagtatagatgatagatagatagatagatagatagatagatagatagatagatagagacaggtagatctttctcacttttgaaaccactttctataattctaaagtagacatgcaccaaaattaattaaactctttcttcctaatggacatataagttgtttcccatttgctatatgataaatagaataaaataaacatctctgcctatgaattttaggcaaacatggttttcttataagaaggctatattaacatggacattgggttaaagtgaaagggtgaaaatagtttaacatttaaaatatttctaaaatgttattacaaaaatgctgtaccaattcaaattctcataaaaatcacaattgatttaaaattctgaagtgtggacaggatatttcttctctgctttgagaaggatttggtgagactgaagaggaaccagggaaggagagcagacaggagaccctcagcctgtgagggaggatccagggaggatccaggagagagccattgctagtgtcaatgacagagagcacatgcaaaaccaagtccactgagacccaggcaggctggcactccgagctctaaatccagacttcaggccggtggggtcaggagcctgagggagagaagggggaagggagggggcaggacaggacaatgaacaggaataggcttgggaaatcctggcaccatcatcaccagctggaggaggccctgtgatctgagtgggtaagcctgttggctgaatgcaccagggctgtgctggtcaaccttcccgccctcagaatccccttccctctctccggaatagtttggctggctccctgcatcattctgggccagctacctctcttgaaccctccagtggtcctttgcaccttcgccagcatcccagatctgggagaggccttcatgcatgctgggggctggtgttttatcccctgggggccctccatagaggctgggctatgtgagtgtgttgctgactgatgaccaactgccaaaacaggccaggaatgcccatgagcagttgaaaggggcagtggggctgcatggaggagaaatgggaggaagagtgccctgggactagtcagctcagactctgcagatgaaggattggctgtggacgtgccttgaaaatgaaccaggtggtgactgcgtctcagatggacttctgtggcttctgaactcttggcacacaagaggactggtgtcgtagggcagtgatcgctggactatgttgccagcagacactgtctggcgtacagggctggcccaaggtgtgtacatgagcaggttgtatggcaaggcgttggagttggcagccttccttgttaaactgatggggatgtgtggggtccaataaaggaaacatcatgcaccatcctgttgggagcatcctcacctccatgacggtgtttgggcctggggataaggcatctgtagtgaccctctcgttggtagtttccacgggtttttctgagctcaagtgagcacaggtgaaggaactgtgggtttcttcatgcaggtcggaggcccaggccagaccgactccataatttgaaccaaagaattcccatgcctggtactttcattcatttcatgcacttattgattcctacagaaaacttttattcaatatatgctgaggaaacaccaagtcaaaaaaacacaagaaagcagcagtgcccttaactcagtctatggggggcgtgagggagatggtgaggtggaaagacacggaagagttttaggaagtgagggactgtgaactgatggagagaatctctattgacctgacttctgaggttggtgatgttgctcccttagttgagagggagggagaagggtaagagttggtggtgatttgatgaagaagagtgtggaggatgagatccgtgggcagcattttaaagctcagtctaggatttttttagacatggatgttttatgaaaatatatagtgttttaacacccacaggtagtgatgcacgtattgatatgtcacatgcctttgccacgtaataagatgaacgcaaggtcttcccacaactatacctacaatcgacatcacttttgtaagtattccctagaattctaaagtaggtgtgtgccatagttaattaaacctttcctttcctgataaacacatacgttcattcccatttgttgctatgattaatagaactgaaataaacatacgtttttggacagatatgcatgctttccaataagaaagatatagtaacatggacattgggttaaagtggaaatggtgtgaatagtttaactttttagaagtattgtcaaaattttattccaaaaatactgtaccaattaattttctcacaaattaatagatgtgaatatcctacactcacagaaagattttgtgttatcaatcttctcatttttggtgaaaattatgaataaaatttagtgaagaaatattgtttcactgttattttgtgtctttgctttctctaattaggttaagtacacactaacttaatccctcacccatatgaagttggatttatacagtgacatcctgagtaacatttctctaggcatggtttaacattctgaaatggggacaggacatttctcttgtgctttgagaaggaattggtcagaatgaacaggagccagggaaggagagcagacaggacaccctcagcccatgagggtaatcgggaggatccagcactgatatggtttgattgtttccccacccaaatctcatcttgaattgtagctcccataacctccacgtgtcatgggagggatcaggtgggaggtaattgaatcacagggataagtttttcccatgctgttctcgccgtagtaaataagtcttaggagatctgatgttttcacaaagggcagttcccctgcacatgctctcttgcctgctgccatgtgagacatatctttgctcctccttccccttctgccatgattgtgaggccttcccagccatgtagaactgtcagtccattaaacctcttttttttattattataaattacccagtctcaggtatttcttcatagcagtatgaaaatgaacaaatacaaggggagagcaatggccagagtccatgagagagaccgtatatgaaaccaagtccacatttccccaggcaggctggcattcagaggtctgaatccagagttcagcccggtgggggcagggacctgagggagagaagggggaagagaggagggagggcaggacaatgaaaaggaataggcttaggaaattccagcaccatcgtcaccagctggagggggccgtgtgatctgaatgggcaggcctgttgactgaatacaccacggttgtgctagacacccaaccctccctcagaatccctttccctctctcacgaagagtatggctggctccctgcatcattctgggtgagctccctctctccaccactccagtggtcgtgtgcacttttgccagcgtcccagggcaggaagttgtcttcaagcctgctgcgggctcctgttttatctcctgtggaccctccatagagcctggactatgtgaatgggttgctgattgatgagcaacaaccaagacaggccaggaatatttatgaggtgtaaaaggtggcagcaaggctgcatggaggggaagttggaggaagagtgccctgagactagtaagctcctactctgtagatgaaggattggctgtggacatgcaatgaaaatgatccaggtggtgaccatgtctcagatggactcgtgaggcttctgagctctcggcacatgaggagacaggtgtactggggcactgatcacaggcctgtgttgccaccagacagggtctggggtagagggttggcccaagctgtgtatgtgagcaggttggatggcaaggcagtggagttggcacccttccctgttaaactgatggggatgtgtttggtccaatagaggaagcgtcatgcaccatcctgttggaagcatccttacctccatgataagtgtttgagcctggggagaaggtgtctgcagtgaccctctccgtggtagttgccatggaatttctgaactcaagtgagcacaagtgaaagaactgtgggtttcttcatgtaggcaggaggcccaggaagggcagactccataatttgaatcaaagaattcccatgccaggtgatttcattcattccatgcacttattgattcctacagaaaacttttattcaatatatgctgaggaaacaccaagtcaacaaaacaatagaaagtggcaaagcccttaattcagtctgtagggagtggggggagatggtgaggaggtgtgaatcgcccatctgagccagggaggccaggaaggcagagccagacttggggactggcagtgtgcaagaaaaggagagacagcctgtgtccaggccagaaagctctccttctatgacagtattggtctggttttcctcctggatactgcctgtgtctgaaagcaactgctgctctctgtgcctacctgcctttgttaacagggaaaatggtcatggtcagcggatgctcacttctgctcaccttggatcacttctactgaagagatggtttgacagcaagcagacaggaagaaacttttggggaggatgaatatatttttcaccttcactgtggttgtggtttgatgggactaaatgtttgtcaaaactctttgatttgtttctcagtacttaggagaaaaagtaagcagaaaaccaggaaggatatagatgacctgaaaagcaccattaactactctgactaaataaaacaataagaaaagcaccgcattcaacaatagcagaataaacaatcctctcaagtgtgcatgaaatatctcccaagatagatggtattctgggccatcaaacaaagcttacaaattgaaaagaatagaaataatagaaagcctcttcttagaccataatataataaaactcaaaaccaaacaccaagatatctgaaaaatgcccaaatattggaaattttaaaataagctcctatataacctatgggtcaaagagggagtcccaggagaattttaaaaatacattaagttgaatgaaaataaaaatgtacatacaaaaagtgggattctgctaaagtgtgtccttgagggaaatatatagcatattttaaatgtttatattagaaaatgaaatctaaaatcaataaccataactttcactctaggaaaccaaagaacgaagagcaagttgaatttaaagaaattgtagaagatcccacctccctcccttctcacactcccacctcttcccccttactccctacccctaccatttgagacacacagacacacacatcattttacaacatgttcattttattttcgtcaccatggggtataccctttggggtataaaatgtactctacaccctgttggctatttttctggggttagacctctggagacttttcaggtagccttgaggtttctggccttgcccgggaattactggctgcccaaagagagactggagaaggtggtggtctccttgcccttgtggtcctactgtgtctcattttgattgagttcttttggctggtcggagtggctggatagtgttggcccactccattcctcaggtttttttgaagcggtggtcttttagggagagccttttgttcctggaacttccttgacgggtccctgttcccttccaggttgtcttggcaacctggaaaaccaaccaggagatcaaagaagggcactggtttggggaagaggatggagaaggggtgagaacaggggcttcatagagaaatggggcagggtggggtgggggttgtgccaggggaggacagggtaggatttagagcttcggtgggccgttcactttgatagggcttctgggctagggttgagaggatgctttccacttcctcacctctttggtgttggtgggtggttgttggacaatgggctggaggctcgtggtttcctggacatcttcaccagaccagtgtctctcaacagtctactccagtccacctggtctctccatgcctcccccaggacagtgaaggcaggccagcaggctagaaactcacagcgcatttttatgttagtcttgtggtagaattccttttccaggaaaccttggtcttttctcttaacaccttcaactaattggatgaggcctatccacattatggaagttaaactgctttacttaaagtcaactgattgtaaatgttgatcacatctacaaaataccttcacagcaacatctagactactgtttgaccacacagctgagcagtatagcctagacaagttgacacataatactagccgttgcacatatcttgcaccatacaaaaatgtaactcaaaatgagccacagactttatatgtcacaattacattgctttttttttctaggacaaaacaaaaaaaattgtgttacctgaggttatgtcttagcttaggctgccataacaaaatgccattgactgagtagctgaaacaacagaaatttatcttttttcagttttgaaatgtggaagtcccagatcaaggactggcggggttgtcttctggtgatggccttattcctggcttgtagatggccctttattaatttgtcagttcttggcctttcctctgtgtatgtgcagagagagagagaggaagagagagagagaaagaaagagagagagagagagaagtcatgcaggcacaaaagtactttcttctgtttcttctcccttcttacaatcacactaattctgtgggatcaagctcccacccttatggcctcttttaacattaattactaccttagaagcctcatctccaaatactgacaccctggggctgagggtttcaaaatatgaatttggtggaggacataagcattagcaaagaatagacacatagattaataaaacagaatagagctcagaaatagacctgcacacacatagtcaggtgattcacaacaaaggcaataatggtgaaagtacaggttttccaacaaaaggtgcctgaacaattagacacctatacacaaattataataacctagacatatccttacatattgcacgaaaattaactcaatacatcatagacctgatgaaaaatacaagaactatacaacctctaaaagaaaacgtaagagaaaatccacataactttgagtttggtgatgagtttttaaattcaacaccaaaagcatgatcaaggaaagaaaaatttgccaagttgattttattaaaataaaaattttatgctcttcaaaggacaatgttaagagaatgaaaacaagccacagtctagcagaaaaaatctgtggtacacatatgtgataaagaacttgtctctacaatatatacgaattcttaaagctcaatgatagaaaaaatgaaaatagtcaaagatctgaacacaatctacacaaaagaagatacacacagggcaaataagcataataaaatactgagtgtcctttggcattagataattgtgtactaaagtgagatactactacacacctattagaatgtctaaaacccataaaaaagcaaaacaaaaccaagaccaattgccagtgaagatgtggagcaacagaaactccgggcgtggtggaaattagaagtttaacaaatggccgatggctgttatttctaatatttttaaagcctaggcattaacactctgggactttgttgttgttgtcgttgttctccaggagtcatcagaaaatatacagctcaacaggacatgggataattaggccaaaaaggaagcttcacctgtaaaattcagttaagtatttcctcttagagaatgcacttcaaactttgtgtgtgcgggagttttgcccagccaggtgcaacccaaaactcctagaatgtgtgtcaaagaccaattccttccatctctcccagctgctttcccacccaaaccactattttcatccattttgttaccatccaaaatctggcccacgcctacaattggtcaaattgcacttgagataacctagttagaatgcctttttaatggagtcagctctggctctccctgcctggcagaaaagcacctggccagtggcttctgggtcacccttcctgggaaattcagccttatcgctcaggaaacccttgcagatgatagattttcatcacctagatcttgggttgtgttcaatagcagtgggacaaaagcacaggacaccttctattccagccccaggtggagattcctctctgttcatcccccatccgaaataaactactcagagttgctttccattccaggcttttctctcattcactgagaatctgtgggccctggacccacccagcttcatcagagtcagctccttcagaaggaactgcaggttcccaaagtccaaaatgccccagctcagggcatttacactccacaactccctcctggaaccccacaccctcacccttctcttatatttcctctacatcttacaggacttcttgccaccttaattatatgactgcaggtcctaggctctacaaccctacgggtaggcgtgagtcttgcttaccttagcatccgcactactaacgcagagccttccacagagcagatgctgagtgaatggaaaataaatgagccagtgaacaggaagaattatttattcagatttaatttctcttaaattctcaaagaagccaaggatatccaggtatccatgcttttttttcaaatttacagaatagagtgaggtataaggcaagaattaagtatcttttaacttcttgaggtctttatctcatgtattttactgctaattctttcacaattctaagcacatactttttccactgctgttatttgtcacaattcacaaaatggaatggatttcccaatctgaataaaaaacaacactcttactcctaaactatataaacagcactatgtgtgactactgtcattcataaacttggatgctgaagttcattcaaccatccgttaaaaggaacatttgaacaattccaacaggaaacaaagataaatctcaaagtcatccaatagaacagaaactcactactaacaatactgactgctctcttcaaagagtgaagaatgggcctcatatcacacgaggcagtggaaactaatggatggggccttggaaggtgcactggcccagaccccctcccactggccctggctgcaactcgtgctcagactcactcttccccctctctaaaagcccattcatgcaggggtgggtaggaaatgtgaggtcctccactgatctttagcaaatggtgcaggactttcacatagctggtttcaacgagggcccttggaccccacaggaactcgtagcatgcaggatcactgccggggacctgccggtactccaggtagttttcctgcaccaaatcttgggtgagcagcttcctgggatgcgcaaagacactgtcctccctcccatcagatgcctccaacacactcagctcctcccagattttctcctcaggggcacagtcgccctcttttgcgattatggccaggacgattatcaggaggcctgtcttgggcacgatctgattgtcgcccagcaggccatcgtaggagaggcccaggcaggtgacaaggatgtacaagtggccgatgcggaccacttccaccacctcgatgccaaagaccagctgcaagtactcggaggctttgctgaagatcacaggaaagaagtcctggaaatttctgatgacactccccagcatttctgcctttgtgaatggctccctggctcgatacttgaggagcagaaaatgaaccaactcagccatcttcctactgagtgctacttggaagctcgtctccaggtcaggaaaggtgcttggcccttcctgttcttcgttgctggagccctcatcggattgactccagagagtatagttgatggtagtggggagggtggaggctccctgaggactgtggggaggacttggtgactcggcagcaggcacctcccgcagggtgacttccactagagtagaggaggaggaggcagtctcctgctcctcagtagcaggagcctgcgcacccaccaagcccagggcctctccttgggcctcaaggccttcctcaggcttgcagtgctgactcctctgctcaagtggcatgatgactctggtcagggcagcaggtaggagtgtgggcaggagctagtgctgctccggggcctgtctcctcagaacctgaaggaacaagtgagagggcgcctcagggtacagccggccagcacatgctgaggctgaaggaatgacagtagggagggtgaggccaggcgctctggagtcccatgtgttctggggccggtgcggcccttggtgtgcattcaaggcaaaccttcagtgttggcactgtctgcaccccctctgctctgtgacctcaggacactgcctcagaccaaggcctcactgccttgttcttggaactcctgattcctgggagaggaatccatgggcctcagggtgcagactgcaagtacagccacagattcccaaaattgtcaggagggtcggccagactctgtgaggtccccactctactggggtggagggtcccttctgtgctcactcagggccctcacctttctccttgcagggcctaataccgcccttttgctggccaaagaaactctcatggcaagaattcacatccctgatacggtacagaaggacatgaggggaccaacatctggccatacataaccagatcctcccacaaaggacaatgagagatgtccaaattcattggagtccaggtgtcctgggtgacgagcctgcttggtcctcaccactactcctgctagggcctgagagcctccctctactgacctgagtgcagccccttcagaccaaggcctccctttccctgacatcaaagatcccaggataatggagggacctcagcaggtagccttgcccaggctctctgagggaatagcaggggcagggcagatttctgtggggccctctgtcagcgttctggcccaggggtaccctcaatcctacctcaggcttctcacctggatgcttggtagatcttaggaccactgtgtctgtcgactacatgggggcccctgtgttgacctgagtcaccctctgaagaaaaggtcctcaactccctgagatctggaaacagaagtgaggaggagccacatcctgtcactcccaggtaggttgtccagggctgacccctttggttctagggtgaggcttctgatggcctcctgtgggttactcatctttactcctgccagggactgcccttcctcaacccccaaccccctgaaatgagcagacagctcctctttacaccaacaccttatctccctgagggttccccaacctcttgcctgtggtacaaatgacattgccaattggagctatctctgatcgggttcccttagagctaagaataagggacagccagactctgtggcatcccttctttctgggccgggggtatccccagtcctcatgaagggggcacaccttgggtccggcagatcctgggattcctccctctgctgacctgaagtgccactcctcagaccacagcccgcaaatctgtcaccctgaagtcgcaatgagcatggggcacattaggccactgtgcccaggatcccccagcccaaggttgccactgatctggactccaaggtcccctcagtcctccctcttcttcctccccttgactcctcgcagggctgggctccaactccctgctgaagtgggtctgtatccctaggattcccgcggccgaatgaaaaggtggctcagtttgagacaggggtactttgggcccctgtcctggcatgctgggagccctccggactccattatcttccaggaggggcttgggcccatcctctgcttcccaaaggccgtactcacgataccgacccccttccctccctgagccacagatgtgaacgtcaggatccgcgtgcttggccgccattcccggagcttccgtgggttgattgcaggggcaaagctccgattctgccaggatgggtggggatgggaatcggggtttgggggtcccgttgatgtttgagcgatggtggtgggtttggtgttgggggatgggggtggggttggtgttgggggatgggaatggtggtgggggtgcggggggttaccctcagtcccctcttggggtcctgaccttgattcctggctgagtctgggccctgagcacttctaaccagccctgccctggtcacacaaagctcttacaccagagttccctgcggttaaagcggcggggggtggcggggtgaggtggtggcgactcagcctgagaagtcttcccctgcagggtggtccaggcccggcagcagaggcagcgctggattattgggggccctctgtctggggtgaggcccgcctcagtcctccctcggcatcttaccttgcctcctcacggagcctgcgcctgcttccctccaccgacgtcaggccgttgctcagggcgagaatctcgctgttctctgacctccaacgcgcaagtcagtggcgtcacatccggccccgtgacttccctgggttcacagcaggggtggaactggattcttcctggatggggatccagatggaggtggaggtaagcatgaagatggtgttgggggtaggggtagggatagggacggggatcctgaggctgtagatcctggtggggttgggggagttgggggtgggaggggcctttggtcatccctcaaggtcctgacttggatgccaggctgagcctggaccgccatcctctgccgattgtgtctgctcccctcagaccaagtctctgactctgagtccccctgaagtggcactgggggaggggtgtggtcggggtgacattattgcctaagtttaccagggctgacaagagggactgagctggattctgtggtcccactacgtgggggagggtggaccctcagtcctcactcaagagggtcctcttcctcactcctggctgttggatgaagtgattggcaggagatactctgtttctgtaacgtctgtgcatttgcacagctgcaccccttgtagagaatggctgcgggtcccaggccaggagctccctgcagggcgggagctcccacgatcgtattgacctctggaagaagacagacactttcccacgggagctcctctccagccagagctacacttggcaaacctttggtcctaaatgatttattcactgaattgaagaaatacggtttacatatcttccaagtatatatgtaggtagcgatatatatatttatttctacgaactaacacctacccttagtatgcatcgttcactcttactatcctaatctacttctattccagtctttgtgttctgttgaaggaatttttttttaaacgtaattcctctcccactatgttggtttcaggttgttattagcagaactctggagccatgctgccttaacaaacccaattttcctggtgtcctgctattacctagggctcttggcatcgtgttttcaggagctgcctcagattgtgcaatgaagtgaagtggaaattttaaaacttttattctacccattctgttatctgccgtctaggcaggctacaaacctccccaacatccctgccgctaaccccctctaaccgacacggcaagtgtcacacacaagtaccagctcaacaaggtcttcagtctcaccctggactggccctgttttgttgtgtagattttcttgctaatactggttttttactttctgtttccattctataaatttacagggttgatttgggaagcagagcacagcagcccaaatttgcttgtaatgtcggcgactacaggtaaggcactaaattgtaaataatttaagctgagtttacatttttacactgttgtgttccccatgaatgaatatgttatactcctctatgtatgtcaagctattttttcctgaatatgtcagtatacttcgatagttgcctctataagcagcttatacatttttattagacttctattcaggtaattcttggattttattgctattgcaaatggcatattgtctattaattgctgtagttagttattgctttcgtgaggtgaagattttgattttgctgtagtaatctgttgcacacctcattctgaaggccgatgcacttgaatattccacatgccttttcctttgaattttcaagatcgataatggtattatcactaaacattacatgtttttccaatattcataccacttactcattttgatacttatagctttttgtgtctcaatcctgatttcaaacgtagagataataggctacatctacttctcgttcctgactggaatgatagttcttcgaacatttgacatttaagtatgtttgctgttgattttaggaaatggaagtgctctttgaatataggttaaataaatattttcttttttccataaactcattaaatgtctttaaaaagctttttctgtaccctttgacaggatcaaattttttctcctccattttgtatgtaaggaattacaatgaaaccgtttttttttttctgatgttaaatcatatgttatttccttgggcagagcctgtctatttgtttaatatgctactaatttaggtaaggtatttactgctaggtaagggagcttacttggtgtgttctttttccatcggggagggatgtggtcctcatctgattttgaatccaggagggctagtctgggagaatgaactgaacaattgtcaatcttttgtatgttttggaagagttgatataagatggtggttagttttccctgatcatttggtagaattggcctccaaaactgcctaacctggaatgtttgagggtggcttgagctttgaatattgtacagtttcagtttgtatagtttaattaaagttttctttttctttttggatcagtttggttactgatgtattttatttctatgaagtggtcagtttcatttaggatttcacttttaatggcatatttgtgataaaaaacgttttattagggaaagccttcacacatacagaataacagaaactaatattatgaacccaggatacttgataccgagcatgaacaactttaaatacacagcaaagctggttccagttagacacttgcctacctgcatatgagcttctgtaataacgtggagccaatctaaggcattagaccatttcatctctaaacaatttaacatgcattttaaaggaaaaggactttttattaaacaaaaacccaatagcattgatatctaaaaaattaaataaatgattatcaaatgttcaactattttacaaacttatctggaagacatatactttataaaatatatatttctttgatgaagtacccaaatatgataactttccccccacttgcttcactgtggtggtttcatacatctataatacagctaggtttctgtgtgtgtaacattttacattctgttctgtgattctccaacctcttaagttacttttagacgttacatacattaagcttcactctttgtgctgtaaagatctatgggttttgacaaatgcctcttgccattgtcttagtccgtttgggcttccataacaaaaatagtgtagactaggtggcttataaacaacacaactttatttctcacattctggaggttggaaagtccaagatcaaggtgctggcagatttcatgtctggtggagtcctgctccctagttcctagacacctgccttttccctatgtcctcgcatggaggaaggggcaagggatctctgtggggactattttataaaaacactgatcccattcatgaggtctctgctctcatgaactagtcattctccaaataccccaccttctacctaataccatcaccttggtatttcagcagatgaagtttgtgggaacacaaatattcagatgaaagcaagcacggaaccaccattacagtattaccatactagtttcactgccctgataaatcccctgtgcttgtcagataacccccttggctgccactgataggtttttcatctttataattttgccttttcctgaatgtcatataaatagactcgtatactatgtagcctttttagactcgtttctttctagactcgtttctttagactcgtttagcataatgaactgaagagtcatgtaaaactttgtgcagcttgtaacttattccttttcattgaggagtagtagtatcattgggtgtaccatattttaatgcgtgtgtgtgtgtatgtgtgtatatatatatatatataatccattcaccaaatgaaatacattttggatgctgctatttttggtgattgtgaaataagctattgtatacattcatatacaaatttttatgtagacataagttttcaaatcaattgggtaaattgattgagtatggctgctgaatcttacgctaagtctatgttccgttttttaagaaaacgccaaattgtcttccaaagtggctgtgccatgttgcatttccacgagctatgaatgagagtttctgttgctccacatcttccctggcaattggtcttggttttgtttgctttgttttgcttttttatggattttggacatactaataggtgtgtagtggtatctcattttagtacacaattatctaatgacaaaacacgctcagtacatttattatgcttatttgccatgtgtgtatcttcttttgtgtagtgtgtgttcagatctttgactattttcatttttttctatcgctgagctttaagaattcgcatatattgtagagacaagttctttatcacatatgtgtaccgcagatgttttctgctagtctgtggcttctgttttcattctcttaacattgtcttttgaagagcacatgatgtttattttaataaaatcaacttggcaaatttttctttccttgatcatgcttttggtgttgaatttaaaaactcatctccaaactcaaagttatgtggatttctctcatgttttcttatagaggttgtattgtttttgcatttttcattagacctatgatgtatcttgagttagttttcatggaatatgtaaggatatgtccaggttattataatttgtgtataggtgtctaattgttccgacaccttttgttggaaaacctgtactttcaccattattgcctttgttgtgaatcacctgactatatgtgtgcaggtctatttctgagctctattctgttttattaacctatgtgtctattctttgctaatgcttatgtcctccaccaaattcatattttgaagccctcagccccagggtgtctgtatttggtgatgaggcttctaaggaagtgattaatgttaaaagaggtcataagggtggggccttgatcccatagaattagtgtggttataagaagggagaagagacagaagatagcatttttgtgcctgcatgagctcgctgtctctctcgcgcgctctctgcacatgcacagaggaagggccaagaatggacatattgagaaagggccatctacaagccaggaataaggccatcaccagaagccaaccccgccagtccttgatctgggacttccagacttcaaaactgtgaaaaaagataaatttctgttgttccagctactcagtcaatgacattttgttattctagcctgagctgactagtacataacctcaggtaacacaatttttttttgtttcctcctagaaaaaaagcccgtaattttggcatttaagattgcggttcattttgagtcacatttttgtacggtgcaagatatttgcagtggctagtattatgtgtcaacttgtctaggctatactgctcagctgtgtggtcaaacagtagtctagatgttgctgtgaaggtattttgtagatgtgatcaacatttacaatcagttgactttaagtaaagcaatttaacttccataatgtggataggcctcatccaattagttgaaggtgttaaaagaccaaggtttcttggaaaaggaattctaccacaagactaacataataatgtcgtgtgagtttctagcctgctggcctgccttcactgtcctgggggaagctcggggagaccaggtggactggagtagactgtacagagacactggtctggtgaagatgtccaggaaaccacgagcctccagcccattttccaacaaccacccatcaacaccaaagaggcgaggaaggggaaagcatcctctcatccctggcccagaagccctatcaaagtgaatggcccacccaagctctgactcctaccctgtcctcccctggcacaacccccaccccagcctgtaccatttctctatgaaacccctgttctcacccctcctccatcctcttccccaaaccagtgccctcctgtgatctccctgttggctttccaggttcccaagacaacccagaagggaaaagggacccgtcaaggaagttccaggaacaaaaggctctccctaaaagaccaccgcttcaaaaaaacctgaggaatggagtgggccaacactatccagccactctgaccagccgaacgaggaactcaatcaaaatgcgccatagcaggaccacaagggcaaggagaccaccgccttctccagtgcttccttgggcagccagtaattcccaggcaaggccagagacttcaagtctatctgaaaagtctccagaagtctaaccccagataaatagccaacagggtgtagagtacgttttacaccccaaagggtatgccccatggtgatggaaataaaatgaacatgttgtaaaatgatgtgtgtgtctgtgtgtctcaaaggttgggggtagggcttaaggggaagaggtgggagtgtgggaagggatggggggatcctctacaatttctttaaattcaaattgctcttcgttctttggattcctagggtgaaagttttggttattgattttagatttcattttctaatataaacataaaatatgctatacatttccctcaaggaaacactttagctgaatcccatttttgtatgtatatttttattttcattcaacttaatgtatttttaaaattctcctgagactccctctttgacccataggttatttaggagcatattttaaaatttccaatatttgggcatttttcagatatcttggtgtttggttttgaatttaattatattatggtctaagaagaggctttttattatttctattttttttttcaatttgtaagctttgtttgatggcccagaataccatctatcctgggaaatatttcatgcacacttgagaggaatgtttattctgctgttgttgaatgcagtgcttttctcattattttaattggtcagagtagttaatggtgcttttcaggtcatctatatccttcctggttttctgcttactttttctcctaaatactgagaaacaatttaaacagttttgacaaatgtgtagtcccatgaaatcacaaccacatagaaggtgcaaaatatattcatactccccaaaagtttcttcctgtccttttgctgtcaaaccatcccttcagtagaggtgacccaaggtgagcagaagtgagcatctgccaaccattagcattttccctattaacagaggcaggcaggcacagagaacagcagttgctttcacacacaggcaacatccaggaggaaaaccagattgatagtgtcatagaaagagcgcttgcttgcctggacacaggctgtcactccctttgttgcacactgcctgtccccaagtctggctctgccttcctggactccctggctcagatgggcgattcacacctcctctccatctcccccatccccttacagacagtattaagggccttgccactttcttttgttttgttgacttgctgtttcctcagcatatattcaataaaagttttctgtaggaatcaataagtgcatgaatgaatgaaattaccaggcatgggaattcattgattcaaaacgtggaggctgcccctgccttggcctcccgcctacctgaagaaacccacagttccatcacctgtgctcacttgagtttagaaatcccctggaaactatcattgagagcatcactgcagatgcctactccccatgcccaaacactatcatggaggtgaggatgctcccaacagtattgtgcatgatgcctcctgtattggaccccacacgtccccatcagtttaacaaggaagggtgccatctgcactgccttgccatccaacctgctcacatacacaccttggaccagccctctaccccagacactgtctggtggcatcataggccagtgattagagccccaggatacctgtctgcttttgtctcaagagctcagaagcctcagaagtccatctgagacatggtcaccacctggatcattctcattgcacatccacagccaatccttcatctgcagagtcgcagctgactagtcctagggtactcttcctccaaattcccctccatgcagccttgctgccaccctcaccttccactgctcataaatatttctggcctgtcttggctgttgctcaaaagtcagcaacccattcacatagtccaggctccatggagagttcacaggggataaaacagcagcccccagcaggcatgagacaactccctgccccgggacgctggaaatggtacacacgaccactggagtggtcaagagagggagcttgcccggaatgatgcagggagccagccatactcttcgtgagagagggaaggggattctgagggagggttgggtctccagcacatcgctggtgcattccatcaacaggcctgcccattcagatcacacggccccctccagctagtgatgatggtgctggaatttcccaagcctattcattttcattgtcctgccctccctcctctcttcccccttctctccctcaggtccctgcctccaccgggctgaactctggattcagacctctgaatgccagcctgcctggggaaatgtggacttggtttcatatacggtctctctcatggactctggccattgctctccccttgtatttgttcattttcatactgctatgaagaaatacctgagactgggtaatttataataataaaaaaaagaggtttaatggactgacagttctacatggctgggaaggcctcacaatcatggcagaaggggaaggaggagcaaagatatgtctcacatggcagcaggcaagagagcatgtgcaggggaactgccctttgtgaaaacatcagatctcctaagacttatttactacggcgagaacagcatgggaaaaacttatccctgtgattcaattacctcccacctgatccctcccatgacacgtggaggttatgggagctacaattcaagatgagatttgggtggggaaacaatcaaaccatatcagtgctggatcctcccgattaccctcatgggctgagggtgtcctgtctgctctccttccctggctcctgttcattctgaccaattccttctcaaagcacaagagaaatgtcctgtccccatttcagaatgttaaaccatgcctagagaaatgttactcaggatgtcactgtataaatccaacttcatatgggtgagggattaagttagtgtgtacttaacctaattagagaaagcaaagacacaaaataacagtgaaacaatatttcttcactaaattttattcataattttcaccaaaaatgagaagattgataacacaaaatctttctgtgagtgtaggatattcacatctattaatttgtgagaaaattaattggtacagtatttttggaataaaattttgacaatacttctaaaaagttaaactattcacaccatttccactttaacccaatgtccatgttactatatctttcttattggaaagcatgcatatctgtccaaaaacgtatgtttatttcagttctattaatcatagcaacaaatgggaatgaacgtatgtgtttatcaggaaaggaaaggtttaattaactatggcacacacctactttagaattctagggaatacttacaaaagtgatgtcgattgtaggtatagttgtgggaagaccttgcgttcatcttattacgtggcaaaggcatgtgacatatcaatacgtgcatcactacctgtgggtgttaaaacactatatattttcataaaacatccatgtctaaaaaaatcctagactgagctttaaaatgctgcccacggatctcatcctccacactcttcttcatcaaatcaccaccaactcttacccttctccctccctctcaactaagggagcaacgtcaccaacctcagaagtcaggtcaatagagattctctccatcagttcacagtccctcacttcctaaaactcttccgtgtctttccacctcaccatctccctcacgccccccatagactgagttaagggcactgctgctttcttgtgtttttttgacttggtgtttcctcagcatatattgaataaaagttttctgtaggaatcaataagtgcatgaaatgaatgaaagtaccaggcatgggaattctttggttcaaattatggagtcggtctggcctgggcctccgacctgcatgaagaaacccacagttccttcacctgtgctcacttgagctcagaaaaacccgtggaaactaccaacgagagggtcactacagatgccttatccccaggcccaaacaccgtcatggaggtgaggatgctcccaacaggatggtgcatgatgtttcctttattggaccccacacatccccatcagtttaacaaggaaggctgccaactccaacgccttgccatacaacctgctcatgtacacaccttgggccagccctgtacgccagacagtgtctgctggcaacatagtccagcgatcactgccctacgacaccagtcctcttgtgtgccaagagttcagaagccacagaagtccatctgagacgcagtcaccacctggttcattttcaaggcacgtccacagccaatccttcatctgcagagtctgagctgactagtcccagggcactcttcctcccatttctcctccatgcagccccactgcccctttcaactgctcatgggcattcctggcctgttttggcagttggtcatcagtcagcaacacactcacatagcccagcctctatggagggcccccaggggataaaacaccagcccccagcatgcatgaaggcctctcccagatctgggatgctggcgaaggtgcaaaggaccactggagggttcaagagaggtagctggcccagaatgatgcagggagccagccaaactattccggagagagggaaggggattctgagggcgggaaggttgaccagcacagccctggtgcattcagccaacaggcttacccactcagatcacagggcctcctccagctggtgatgatggtgccaggatttcccaagcctattcctgttcattgtcctgtcctgccccctcccttcccccttctctccctcaggctcctgaccccaccggcctgaagtctggatttagagctcggagtgccagcctgcctgggtctcagtggacttggttttgcatgtgctctctgtcattgacactagcaatggctctctcctggatcctccctggatcctccctcacaggctgagggtctcctgtctgctctccttccctggttcctcttcagtctcaccaaatccttctcaaagcagagaagaaatatcctgtccacacttcagaattttaaatcaattgtgatttttatgagaatttgaattggtacagcacttttgtaataacattttagaaatattttaaatgttaaactattttcaccctttcactttaacccaatgtccatgttaatatagccttcttataagaaaaccatgtttgcctaaaattcataggcagagatgtttattttattctatttatcatatagcaaatgggaaacaacttatatgtccattaggaagaaagagtttaattaattttggtgcatgtctactttagaattatagaaagtggtttcaaaagtgagaaagatctacctgtctctatctatctatctatctatctatctatctatctatctatctatcatctatactgttgtcgaaagatcctacatgcattttataaagtgataaaagtagatcagtatgtatgtcattgttcttgtatattgaataaaaataatatattgttatagtttgtcagtgaaaagcctagagtcagcagtaaaataatacacaacattgttaattgtggtgacctctgcgggggggcggggggtgttgttaactgtggaggagctttgtaaaaaaaaaattgtgaattatctacatttctatcatttttgaaataagaatatataccaaactacattttaaataaaaaatatttaatactgacaacagaaatactagccgtgtcagtttaagtaattgctagctgatgcaacagaacaaccatgaatggcttgacacaacagaagtttattttatgtgcaaataagttctgatgcggtttggcaggggctctccactctcacatgacccagggatccaagctgcttccaccttttgattccgtcatctcaagatgaagctgccatgtttgctgttgaaagcggagagaaagcatggaaatggcacactggctctcaaatgcctggatgtgacaaacaatgcttctgctcctgtattggtgtaaaggaaaagtcacatgatcctaactgcaaggactttactgttcccatgtgtccaggaaggagacagagacaaaatgtgggtgagtactatacccttccccataaactgttacatagtgggtgctcaacaaaaagcaactatgatcatttggtattatactacccttctcatttctaggaggagtttctgagaaggccaaatttaccttgaagttctccagcgttttccagtgtcaaatatgtgactgatgttttcaaacatacgatcacaactaactgttcaagaatcttgaaagtctcagcaggaaggctttcctttgtaatatcctttaaatccttagtaggctgagaattgttcctccatttgattcccggtcaaaatgttaacctgtgaatttctgctaccctccacacgcctgtacacctgtcgaggtaggcacgctgaaggccagtattttcctgtggagcaggtaaacagacaagaaacagaaggctgcttaattattcctctttcattagagttgacgtgttttcaaggtatagtttttaaactcctggaggactccagaaatttaggaattcagcctcagtaagtagatgtttgttccactggggtttcccaaggtttttctcatctaatactcatgagagacggtttgctctttgatcatttatctgtgcatgtattcagaggcgaattccaaaaggacgccctgtgaaagtccgatttcaagtatcaaggtggttccaaatccctctaacttcagggtgacatcacacaagaacccttagataatatggcgaatcagactcctcagcccattcagaaaacgattagagagtgtgttgaagacaaccagagtggtaaccaagtgtctaagcgtcactgtccccgtgtgagtttttatacaaaagggtttttgacatcatatggcttcctgggtgagagacggaacagccagaggacttctactatgagaaggaatgctccctgtcaggaggtgagcaggggattctgggctgttctgtgaggatcagtgaggagctgatcagcaggccctataggttccagagtcagacaggacacatggaagtgacccggggaaatgtgctgtaattctgaaagtgctggggctgcagagaaatgcccacaactgggcagagttagctctcaaggaacctagcgcacaccagccccaaatggtgtttgattctcactgtcgcgttctccaggcctgcttcattatgctggcctcaaggtccttctttttgtcacctgagagacatggtgcagtgctgagaagaaaaatgaagtcgctgtcaggaggtcagcctcgggctcggagaagtggggacagcatgggctctaaaggaattcatgccaggggtctggttccagccctgttccttactagccacgtgatactgagaaatacccaggaaataccctgttcttatatcccaattcacaagctctgtaagccctggattcttcatctgtaagcagatgtgataaggcctgtctagtaggacagtcggagtgtatgcaacgcaggtgaaccacctggctccgggcctggtgtaaattggaagtttcacaaatggcggatggctgttatttccaatatgctttaacccgaggcccgaacactgggattttgttgttgttgtcgttgttctccaggacttatcagagaacatacagctcaataggacatggaataattagccccaaacagaagcttcttccataaaattcagttaagtatttcctcttagagaatgcacttcaaaatttggttgtgcgggagttttgcccagccaggtgcagctcaaagctcctagaatgtgagtcaaagaccaactccttccctctctcccagctgctttcccatccaaaccactatattcatccactttgttaccatccagaatctagcccgtgcttacaattggtcaaattgcacttgagataacctagttagaatgcctttttaatggagtcagctctggctctccctgcctggcagaaaagcacctggccggccgggcgcggtggctcacgcctgtaatcccagcactttgggaggccgaggcgggcggatcacgaggtcaggagatcgagaccatccctgctaaaacggtgaaaccccgtctctactaaaaatacaaaaaaaattagccgggcgtagtggcgggcgcctgtagtcccagctacttgggaggctgaggcaggagaatggcgtgaacccgggaggcggagcttgcagtgagccgagatcccgccactgcactccagcctgggcgacagagcgagactccgtctcaaaaaaaaaaaaaaaaaaaaaaaaaaaaaaaagaaaagcacctggccagtggcttctgggtcacccttcctgggaaattcagccttatcgctcaggaaacccttgcagatgatgggtgtccatcacctagatcttgggctgtgttcaacagcattgggcaaaaacacaggacaccttccattccagccccaggtggagattcctctctcttcatccccatcctaaagaaactgctcagggtagcattccattccaggcttttctctcaccctctgagaatctggccctggacccaccgggcatcattagaatcagctccttcagaaggaactgcaggttcccagatcccaaattgccccagctcagggcatttatactcaccactctcacctggaaccccacaccctcacccctgtcttacatttccactacatcctagaggacttctcgccaccttaattacatgactgcagctcctagactctatgaccctatgggtagacgtgagtctggcttaccttagaatccccactactaccagggccttccacagagcagatgctgagtgaatggtaaagaaatgagccagtgaacaggaagaattatttattcagatttaatttcttttgcattctcaaagaagcaaaaacatacacatatttttaattttacataatagactgaggtataaggcaagaattaactatcttttgagttccttgtatcatgtattttactgctaattcgttcacaatataggcaaatacatattccactgctgttattatgtgacaactcacaaaatggaatggatttcccaatctgaataaaaaacaggactcttacccctaaactatataaacagcactatgtgtgactactgtcattcataaacttggatgctgaagttcatccaaccatttgttaaaaggaacatttgaacaattccaacaggaaacaaagataaatctcaaagtcatccaacagaacagaaactcactgctaagaatgctgactgctctcttcaaagaggcaggaatgggcctcatatcacacgaggcagtggaagctaatggatggggccctggaaggtgcactggcccagaccccctcccactggccctggctgcaacatgtgctgagactcactcttctccctctctcaaagcccgttcatgcaggggtgggtaggaaatgtgaggttctccaccgatctttagtgtatggtgcaggactttcacatagctggtttcaatgagggcccttggaccccacaggaactcgtagcatgcaggatcactgccgggcacctgccggtactccaggtagttttcctgcaccagatcttgcatgagcagcttcctgggatgtgcgaagacactgtcctccctcccctcaaacacctccaacatactcagctcctcccagattttctcctcaggggcacagtcgccctctattgcgattatggccaggacgattatcaggaggcctgtcttgggcatgacctgattgtcgcccagcaggccatcgtaggagaggcccaggcaggtgacaaggatgtacaagtggctgatggggaccacttccaccacctcgatgccaaagaccagctgcaagtactcggaggctttgctgaagatcacgggaaagaagtcctggcaatttctgaggacactctccagcatttctgcctttgtgaccggctccctggctcgatacttgaggagcagaaaatgaaccaactcaaccatcttcctactgattgctgcttggaactcggactccaggtcgggaaacattcttggcccctcctcttcttggttgctggagccctcatcggattgtctccaaagagtgtagttgatggtagtcgagaagctggaggctccctgaggactgtggggaggactcggtgagtcggcagcaggcacctcccccagggtaacttccactagagtagaagaggaagaagcggtctgctgctcctcagtagcaggagcctgcgcacccaccaggcccagggcctctcctcgggcctcaaggccttcttcaggcttgcagtgctgactcctctgctcaagaggcatgatgactctggtcagggcagcaggcaggagtgcgggcaggagctgggcaatgaagacccacaggcctggggagagaaggagcgtgtgtgaggccttaggtgagaactgaactgaaccttggaggctctgacaaaggcttacttacagatcttctccttcaatgctcctccagtgcctcgggtcctacttgtcagcctgtccccctcagaacctgaaggaggaagtgggagggcacctcagggtacagccggccagcacatgctcaggctgcaggactgagaatagggagggtgaggccaggccctctggagtcccatttgttctgggcgggtggggcccttggtgtgcattccaggcaaaccttcagtgttggcactgtctgcgtcccctctgctctgtgacctgaggacactgactcagaccaaggcctcactgcctggttcctggagctcctgattcctgggagaggaatgcacgggccttcagtgtgcagactgcaagcacagccacggattcccagaagtctcagcagggttggccagactccgtgaggtccccactctacttgggtggagggtcccctctgtgctcactcagggccctcacctttctccttgtagggcctaatcccacccttttgctggcttgagaatctctcatgtcaagaactcacatccctgatatggtacagaaggagatgaggggacccacatctggccatacgtgaccaggtcctcccgcgaaggacaacgagagatgtccaaattcattggagtccaggtgtcctgggtgacgagtccgcttggtcctcacgtccactcctggcagggcctgagaccctccctctactgacctgactccagccccttcagaccaaggcctccccttccctgacatcaaagatcccaggataatggagggacttcagctgacagccctgcccagggtctctgaagtaaccgcaggggcagggcagatttctatggggccccctgtctgcattctggcccaggggtaccctcaatcctacctcaggctctccacctggatgcttggcagatcctagaaccactgcatctgtcgaccagatgggggcccctgtgttgacctgagtcaccttctgaaaacaaggtcatcaactccctgagatctggaaacagaagtgaggaggggccacatcctgttacccccacgtgcgttgtccagggctgacccctttggttctagggtgaacgttatgatggcctcctgtgggttactcatctttactcctgccagggactgccctttctcaacccccaaccccctgaaatgagcagacagctcctctttacaccaacaccttatctccctgagggttccccaacctcctgcctgtggtacaaatgagattgtcacttagggccatccctgatcaggttcccccagagctaagaacaagggacggccagactctgtggcatcccttctttctgggccgggggtatccccagtcctcatgaagggggcacaccttgggtccggcagatcctgggattcctccctctgctgacctgaagtcccagccctcagaccacagccctcaactctctgtcaccctgaaggtgcaatgagcacggggcacattcggccactgtgcccaggatcccccagcccaaggttgccactgatctggactccaaggtcccctcagtcctccctcttcttcctccccttgactcctcgcagggctgggccccaaccccctgctgaagtgggtctgcatccctaggattcccgcggctgaatgaaaaggtggctcagtttgagacaggggtacagtgggccccctgtcctggcatgctgggtcccctaaggactccactgtcttccaggagggcctgggcccttcctctgcatcccaaaggccatactcacgagacccaaccccttccctcccttagccgtacatgtgaacgtcaggatccgcgtgcttggccgccattcccggagcttccgtgggttgattgcaggggcaaagcccggattctgccaggatggtggtgggggaggagatgggaatggggtttgggggtggggttggtgtttgagggatgggggtggggttggtgttgggggatgggattggtagtgagggtagggggtgggttgccctcagtcccctcttggggtcctgaccttgattcctggctgagtctgggccctgagcacttctaaccagccctgccctggtcacacaaagctcttacgccagagttccctgcggttaaagcggcggggggtggcggggtgaggtggtggcgactgagcctgagaagtcttcccctgcagggtggtccaggcccggcagcagaggcagcgctggattattgggggccctctgtctggggtgaggcccgcctcagtcctccctcggcgtcttaccttgcctcctcacggagcctgcgcctgcttccctccgccgacgtcaggccgttgctcagggcgagaatctcgctgtcctctgacctccaatgcgcaagtcagtggcgtcacatccgggcccgtgacttccctgggttcacggcaagggtggaaccggattctgcccggatggggatctggatgggggggtgggggtaagcatgaagatggtgttggtgtaggggtagggattgggacggggatcctgaggctgtagatcctggtggggtcgggggagttgggggtgggaggggcctttggtcatccctcaaggtcctgacttggatgccagactgagcctggaccgccatcctctgccgattgtgtctgctcccctcagaccaagtctctgactctgagtcggcccgaagtggcattggggggaggggtgtgctcggggtgagatcattgccagtgtgtaccagggctgacaagaggggctgagctggattctgtggtcccactatgtgggtgagggtggatcctcagtcctcactcaggagggtcctcttcctcactcctggctgtttgatgaaggaatgggtgggagatgctctgtttctgtcacctctgagcatctgcgcatctgcgcatctgcaccccttgtagagaatggctgcgggtgccaggccaggtgctccctgcagggcaggagctcccgcgatgatagtgacctctgggagaagacgcacaccttcccacgggggctcctccccagccagagctacacttggcaaacctttggtcctaaatgatttattctctgaattgaagaaatacggtttacatatcttctaagtatatatgtaggtagcaatatatatatttatttctatgaactaacacctacccttagtatgcatgattcactctgatatcctagtctacttccattccagtctttgtgttctgttgaaagaatttttttaaaaaacataattcctctcccactctgttggtttcaggttgttattagcagaactctggagccatgctgccttaacaaacccaattttcctggtggacactgctattacctagggctcttggcatcgtgttttcaggggctgcctcagattgtgcaatgaagtgaagtggaaaattcaaaacttttattctacccattctttcatctgccgtctaggcaggctacaaacctccccaacatctctgccgctaaccccctccaacagacactgcaagtgtcacacacaagtaccagctcaacacagtctccagtctcactctgggctttccctgttttgttgtgtagattttcttgctgatactggtgttttactttctgtttccattctataaatttacagggttgatttgggaagcagagcacagcagcccaaatttgcttgtaatgtcggcggctacaggtaaggcactaaattgtaaataatttaagctgagtttacatttttacactgttgtgttccccgtgaatgaatatgttatactcctctatggatttcaagctcttttttcctgaatatgtcagtatacttcggtagttgcctctataaacaacttatacatttttattaggcttctattcaggtaattcttggattttgttgctattgcaagtggcatattgtctatcaattgttgtagttagttattgctttcgtgaggtgaagattttgattttgctgtagtaatctgttgcacacctcgttctgaaggccgatgcacttgaatattccgcataccttttcctttgaattttcaagatcgataatggtattatcactaaacactacatgtttttccaatgttcataccactcactcatttcggtacttacagctctttgtgtctcaatcctgatttcaaatgtagagataataggctacatctacttctcgttcctgacttgaatgataattcttcgaacatttgacatttaagtatgtttgctgttgattttaggaaatggaagttctctttcagtataggttgcctaaatattttcttttttaccatgaattcatattaaatttatttaaaaagctttttctgtacccgttggcaggatcaaatttttttctcttccattttgtatgtaaggaatcacaatgaaacagatgttttttctaatgttaaatcatattttatttccttgggcagagcctgtttattcgtttaatgtactactaatttatgtaggatatttactgctgtgtaagagagcttacttgatgtgttctttttccatcaggggaggtatgtggtcctcatctggtttttaaatccaggagggctagcctgggagaatgaactgaacaattgtcagtcttttgtatgttctggaagagttgatataaggcggtggttagttttccctgatcatttggtaaaattggcctccaaagctgtctaacctggaatgtttgagggtggcttgagctttgaatattgtacagtttctgttgtatagttaaagttttcttttcctctttggatcagtttggttactgatttattttatttctacaaagtggtcagtttcatttaggatttcacttttaatggcatatttatgataaaaaagttttattagggaaagccttcacacatacagaataacaggaacgaatataatgaacccaggatacttgataccgagcatgaacatctttaaatacacagcaaatctggttccagttaaacactcgcctacctgcatatgagctgctggaataacgtggagtaaatctaaggcattagaccatttcatctctaaataacttaatatgcatttttaaaagataaggatttttttaaaacaaaaagccgatagttttcatatctaaaaaattaaataaatgattatcaaatgttcaactatgttacacacttatctggccaacttaaactttataaaatatatatttctttgatggagtacaaaatgtgttaacttttccccccacttgcttcattgtggtggtttcatatatctattatacaactaggtgtgtgtgtgtgtgtgtgtgtgtgtggaacattctacctgccgtcccgtgattctccaacctcttaagttacttttaaactttacatacattaagcttcactctttgtgctgtaaagatctatgggttttgacaaatgcctcgtgccattgtcttagtccgtttgggcttccataacaaaaatagtgatagactgggtggcttatagacaacgcaactttatttctcacattctggaggttgggaagtccaagatcaaggtgctggcagatttcatgtctggtggagtcctgctccctagttcatagacagctgccttttccctagatcctcacatgcaagaagggataagggatctccgtggagtctgttttataaaaacactaatcccattcatgaggactctgctctcatgatctagtcattctccaaataccccaccttctgcctaataccatcaccttggtaattcagcagatgaattttgtggcaacacaaatattcagaccaaagcaagcacggaaccaccattgcagtattatgcataccagtttcactgccctgataaattcccttgtgcttgtcggataaaccccatggccaccactgataggtttttcatctttataattttgcattttccagaatgtcatataaatagaatcttatactatgtagcctttttagactggtttctttcacttagcataatgaactgaagagtcatgtataactttgtgtggcttggaacttattccttttcattgaggagtagtatcaatgtctggttatatatatatatatatatatatatatatatatatatatatccattcaccaaatgaaatacattttggatgcttctatttttggtgattatgaaataagctattgtatacattcatatacaaatttttatgtagacataagttttcaaatcaattgggtaaattgattgagtatggctgctgaatcttgtgctaagtctattttcatttttttaagaaaacgccaaactgccttccaaagtggctgtgccattttgcatttctaccagcaatgaaggagagtttccgttgctccacatcttcgctggcaattgttcttggtcttgtattctttgttttggttttctatggattttggacattctgataggtgtgcagtggtatcccattttagtacacaattatctaatgccaaagggtgctcagtacttttattatgcttatttgccatgtgtatatcttcttttgtgtagtgtgtgttcagatctttgactattttcattttttctatcattgagctttaagaattcgcatatattgtagagacaagttctttatcacatatgtgtaccgcagatgttttctgctagtctgtggcttctgttttcattctcttaacattgtcctttgaagagcataagatttttattttaataaaatcaacttggcaaatttttctttccttgatcatgcttttggtgttgaatttaaaaactcatcaccaaactcaaagttatgtggattttctcttatgttttcttatagaggttgtattgtttttgcatttttcattagacctatgatgtatcttgagttagttttcatggaatatgtaaggatatgtccaggttattataatttgtgtataggtgtctaattgttccgacaccttttgttggaaaacctgtactttcaccattattgcctttgttgtgaatcacctgactatatgcgtgcaggtctatttctgagctctattctgttttattaatctgtgtgtctattctttgctaatgcttatgtcctccaccaaattcatattttgaagccctcagccccagggtgtctgtatttggagatgaggcttctagggaagtgattaatgttaaaagaggccataagggtgggaccttgatcccatagaattagtttggttataagaagggagaagagacagaagaaagtacttttgtgcctacatgacctttctctctctctctctctctctctctctttctctctctctctctctctctctctctctctctctctctctctctgcacatgcacagaggaaaggccaagaatggacagattaataaagggccatctacaagccacgaataaggccatcaccagaagccaaccccgccagtccttgatctaggacttccagacttcaaaactgtgagaaaaaaaataaatttctgttgttttagctactcactcaatggcattttgttatggcagcctgagctgacttaagacataacttcaggtgacacaattttttttttgtttcctcctagaaaaaaaaaaagtaattttgacatttaaagtctgtagttcattttgagttacatttctgtatggtgcaagatatgtgcaatggctagtactatgtgtcaacttgtctaggctatactgctcagctgtgtggtcaaacagtagtctagatgttgctgtgaaggtattttgtagatgtgatcaacatttacaatcagttgattttaagtaaagcagtttaacttccataatgtggatgggcctcatccaattagttgaaggtgttaagagaaaagaccaaggtttcctggaaaaggaattctaccacaagactaacataaaaatgcgctgtgagtttctagcctgctggcctgccttcactgtcctgggggaggcttggagagaccaggtggactggagtagactgttgagagacactggtctggtgaagatgtccaggaaaccacgagcctccagcccattgtccaacaaccacccaccaacaccaaagaggcgaggaagtggaaggcatcctctcaaccctggcccagaagccctatcaaagtgaacggcccacccaagctctgactcctaccctgtcctcccctggcacaacccccaccccagcctgcaccatttctctatgaagcccctgttctcacccctcctccatcctcttccccaaaccagtgcccttctttgatctccctgtttccttccaggttcccaagacaacccggaagggaaaagggacccatcaaggaagttccaggaacaaaaggctctccctaaaagaccgccgcttcaaaaaaacctgaggaatggagtgggccaacactatccagccactctgaccagccgaacgaggaactcaatcaaaatgagccatagcgggaccacaagggcaaggagaccaccaccttctccagtctctcttcggacagccagtaattcccgggcaaggccagagacttcaagtctatctgaaaagtctccagaggtctaaccccagataaatagccaacagggtgtagagtacattttacaccccaaagagtgtgccccatggtgatgaaaataaagtgaacatgttgcaaaatgatgtgtgtgtctgtgtgtctcaaatggtaggggtagggagtaaggggaaagaggtgggagtgtgggaagggaggggggcatcctctacaatttctctaattcaacttgctcttcgttctttggtttcctagggtgaaacttttggttattgattttagatttcattttctaatataaacatttaaaatatgctatatatttccctcaaggacacactttagcagaatcccactttttgtatgtacatttttactttcattcaacttaatgtatttttaaaattctcctgggactccctctttgacccataggttatataggagcttattttaaaatttccaatatttgggcatttttcagatatcttggtgtttggttttgagtttaattatattatggcctaagaagaggctatctattatttctattcttttcaatttgtaagctttgtttgatggcccagaataccatctatcttgggagatatttcatgcacacttgagaggattgtttattctgctattgttgaatgcggtgcttttcttattgttttatttagtcagagtagttaatggtgcttttcaggtcatctatatccttcctggttttctgcttactttttctcctaagtactgagaaacaaatcaaagagttttgagaaatgtttagtcccatgaaaccacaaccacagtgaaggtgaaaaatatattcatcctccccaaaagtttcttcctgtcttcttgttgtcaaaccatcccttcagtagaagtgatccaaggtgagcagaagtgagcatccgctgaccatgaccattttccctactaacagaggcaggtaggcacagagagcagcagttgctttcacacacaggcagcatccaggaagaaaaccagatcgatagtgtaatagaaggagagctttctggcccggacacaggctgtcgctccttttcttgcacactgccagtccccaagtctggctctgccttcctggcttccctggctcagatgggcgattcacaccacctcttcatctcccccgactccctacagactgaattaagggccttgccactttctattgttttgttgacttggtgtttcctcagcatatattgaataaaagttttctgtaggaatcaatacgtgcatggaatgaatgaaatcacctggcatgggaattctttgattcaaattatggagtctgcccttcctgggcctcctgcctacatgaagaaacccacagttccttcacctgtgctcagttgagttcagaaaccctgtggaaactaccacggagagggtcactgcagacgccttctccccaggcccaaacactgtcatggaggtgaggatgctcccaacaggatgcttcctgtattggaccccacacgtccccatcagtttaacaaggaaagctgccacctgcaatgccttgccatacaacctgctcacgtacacaccttggtccagccccctaccccagacactgtcatctggcaacatacgccagcggtcactgccctaggactcctgtcccgttctgtgccaagggttcagaagccacagaaggctatctgagacacagtggccaactggaacattttcaaggcacgtccacagccaatccttcatctgcagagtctgagctgactagtcccagggcactcctcctcccatttctcctccatgcagccccactgcccctttcaactgctcatgggcattcctggcctgtctcggcagttggtcatcagtcagcaacccactcacatagcccagcctctatagaaggtccccgggggataaaacaccagcccccagcaggcatgaagacagttcccacatctgggacgctggtgaaggtacaaaggaccactggagtgttcaagagaggtagctggcccagaatgacgcagggagtcagccaagctcttcctgagagagggaaggggattctgagggcgggaaggttgaccagcacagccctggtgcattcagccaacactcagatcacagggccccctccagctggtgatgatgttgccgggatttcccaactctattcctattcattgtcctgtcctccctcctcccttcccccttctctccctcaggcccctgaccccaccggcctgaagtctggatttagagctcggagtgacagcctgcctggggctctgtggacttggtttcgcatgtggtctctctcatggacgctagcaacggctctccccaggatcctccctggatcctccctcacgggctgagggtctcctgtctgctctcattacctggctcctcttcagtctcaccaaatccttctcaaagcagagaagaaatgtcctgtccacatttcagaattttaaatcaattgtgatttttatgagaatttgaattggtacagcacttttgtaataacattttagaaatattttaaatgttaaactattttcaccctttcactttaacccagtgtccatgttaatatatccttcttataagaaaaccatgtttgcctaaaaattcatattcagagatgttgattttattgtagttatcatacagcaaatgggaaacaacttatatgtccactaggaagaaagagtttaattaattgtggtgcatgtctactttagaattatagaaagtggtttcaaaagtgagaaagatctatctatctatctatctatctaccgttgtggaaagatcctacatccattttataaagtgataaaagaatatcagtatgtatatcattgttcttgtatattaaataaaaacaacatattgttatagtttatctgtcagtgagaagcctagagtcagcagtaaaataatatacaacaccgttaattgtggtgacctctgagggggcggtgggggtggtgggcgttgttaaatgtggaggagatttgtaaaggggaaaattgtgaattatctacatttctataagttttgcaataagaatatgtacaatactacattttaaataaaaaaaaattaaacctgacaaacagaaatactagccatgtcagtttaagtaactgctagccattgcaacagaacaaccacgaatggcttgccacaacacaagtttattttatgtgcaaataagttctgatgcagtttgccaggggctctccactctcacgggacccaggaatccaagctgcttccaccttgtgattccgtcatctcaagatgaagctgccatgtttgctagtgaaagcggagagaaagcttggaaatggcacactggctcccacatgcctggatgtgacaaacaatgcttctgctcctatattggtataaaggaaatgtcacatgacccatcctaactgcaaggactttactgttcccatgtgtccaggaaggagacagagacaaaatgtgtgtgagtactataccctcccccataaactgttacatagtaggtgctcaacaaaaacaactgtgattctttggtattacactacccttctcatttctaggaggagtttctgagaaggccaaatttgccgtgacattctccaactttttccagtgtcaaatatgtaactgatgttttcaaatatacgatcacaactaactgcccaagaatcttgaaagtctcggcgagaaggcttccctttgcaataccctttaatccttagtaggctgagcatttttcctccatttgattcccggtcaaaatgttaacctgtgaatttctgctaccctccacaagcctgaacacctctcgagtgcctgtaggcacaataaagcccagtattttcccgtggagcaggtaaacagacaagaaacagaaggctgcttaattattcctctttcattagagttgacatgttttcaaggaatcgtttttagactcctggaggactccagaaatttaggaattcagcctcagtaagtagatgtttgttccactgggatttcccaaggtttttctcatctagtactcatgagggatggtttgctctttgaccatttatctgtgcatgtattcagaggcgaattccaaaaggacgccctgtgaaagtctgatttcaggtatcaaggtggttccaaattcctctcacttcagggtgacatcacacaagaacccttagataatatggagaaacagactactcagccctttcagaaaacaattagagagtgtattgaagacaaccggagtggtaaccaggtgtctaaacgtcactgtccccatgtgaatttttatatcaaaaggattgttgatgtcatatggcttcctgggtgagagacgggacagccagaggacttctactgtgagaaggaatgctccctgtcaggaggtgagcaggggattctgggctgttctgtggggaccagtgaggagctgatcagcaggccctataggttccggagtcagacaggacacatggaagtgacccggggaaatgtgctgtaattctgaaagtgctggggctggacagaaatgaacacatcttgccagtgtcagctctcagggaacccagcgcacaccagccccaaatggtgtttgattctcattgtcgcgttctccaggcctgctttattacgctggcctcgaggtccttctttttgtcacctgagagacatggtgcagtgctgagaagaaaaatgaagtcgctgtcaggaggtcagcctcgggctgggagaagtgggaacagcatgggctctaaaggaattcagaacaggggtcgggttctgccctgttcctcactagccacgtgatcctgggaaatacccaggaaataccctgtttttatatcccaattcacacaccctgtgagccttggattcttcatctgtaagcagatgtgataaggactgtctagtaggacagttggagtgtatgcaacgcaggtgaagcacctgactccgggcctggtataaattagaagtttaacaaatggcggatggctgttatttccaatattttttaacccgaggccctaacactccgggattttgttgttgctgtcgttgttctccaggacttaccagagaatatacagctcaataggacatggaataattagccccaaacagaagcttcttccataaaattcagttaagtatttcctctcagagaacgcgcttcaaaatttgggtgtgcaggagtttcgcccagccaggtgcagctcggagctcctacaatctgcgtcaaaagaccaactgcttctctctctcccagctgctttcccacccaaaccaccattttcatccattttgttaccatccaaaatctagcccgtgcttacaattggtcaaattgcacttgagataacctagttggaatgccttttttaatggagtcagctctggctctccctgcccggcagaaaagcacctggccaggggcttctgggccacccttcctgggaaattcagccttatcgctcaggaaacccttgcagatgatgggtgtccatcacctagatcttgggctgcgttcaacagcagtgggacaaaagcagacgacaccttccattcctgcctgaggtagagattcctctctgttcatcccccattcgaaagaaactgctcagagttgctttccattccaggcttttctcccacactctgagaatctggctctgggcccacccaacttcattagagtcagctccttcagaaggaactgaagtttcccaaagcccaaaatgccccagctcagggcactgacactccactactctcacccggagcgccacaccctcacccctctcttacatttcctctacatcttacaggacttctcaccaccttaattatatgactgcaggtcctaggctctacagccctatgggtaggcgtgagtctggcttaccttagcatccccactactaacccagggcctcccacagagcagatgctgagtgaacggaaaagaaacgagccagtgaagaggaagaattatttattcagatttaatttcgcttgcattctcaaagaagtcaaggaaatcctggtttgcatatttgtttaattttacagaatagattgaggtacaaggcaagaatcaactatcttttgatttcttgagttatctcatgtatgttattgctaattcgctcacaattttaagcaaatacttttaccactgctattattatgtcacaattcacaaaatggaatggatttcccaatttgagtaaaaaacaagactcttactcctaaactatataaacagcactatgtgtgactactgtcattcataaacctggatgctgacgctcattcaaccatccgttaaaaggaacatttgaacaactccaacaggaaacaaagaataatctcaaagtcatccaacagaacagaaacccactactaagaatgctgactgctcgcttcaaagagtgaagaatgggcctcacgtcacaggaggcagtggaaactaagggatgcggccccggaaggtgcactggcccagaccccctcccactggccctggctgcaactcgtgctcagactcactcttccccctctctcaaaacccactcatgcaggggtgggtaggaaatgtgaggtcctccactgatctttaccatatggtgcaggactttcacatagctggtttcaacgagggcccttggaccccacaggaattcataacatgcaggatcactgccggggacctgccggtactccaggtagttttcctgcacgaaatgttgggtgagcagcttcttgggatcccccaagatactgtcttccctcccctcaaacacctctaacacactcagctcctcccagattttctcctcaggggcacagtcgccctctcttgcgattatggccaggacgattatcaggaggcctgccttgggcatgatctgattgtcacccagcaggccatcgtaggagaggcccaggcaggtggcaaagatgtacaagtggccgatggggtccacttccatcagctcgatgccaaagaccagctgcaaggaactggaagctttgctgaagatcacaggaaagaaatactgccaatttccgacgacactccccagcatttctgcctttgtgaccggctccctggctcgatacttgaggagcagaaaatgaaccaactcggccaccttcctactgagtgctgcttggaactcggactccaggtcagggaaggtgcttggcccctcctcttcttggttgctggagtcctcataggattggctccagagagggtagttcatggtagtggggaggctggaggctccctgaggactctggggaggatctggtgactcggcagcaggcacctcccccagggtgacttcaactagagtagaagaggaggaggcagcctcctgctcctcagtagcaggagcctgcgcacccaccaggcccagggcctctcctcgggcctcaaggccttcttcaggcttgcagtgctgactcctctgctcaagaggcatgatgactctggtcagggcaacaggcgggagtgtgggcaggagctgggcaatggagacccactggcctggggagagagggagcatgtgagagacctcagctgagtactgaatggaaccttggaggctctaacaaaggcttacttacagatcttctccttcagtgctcctccgggggcctctggtcctccaggtcagcctgtcccctcagaacctgaaggaggaagtgagagggcacctcagggtacatccggccagcgcatgctgaggctgcaggactgaaagtattgagggtgaggccaggcgctctggagtccatgtgttctggggcaggtggggcccttggtttgaatccaaggcaaaccttcaccgttggcactatctgagccccctctactctgtgacctgaggacactgcctcagaccaagtcctcactgccttgttcctggagctcctgattcctgggagaggaatccacgggcccccaatgtgcagacagcaaacgcagccacggattcccagaactgtcaggagggttggccagactctgtgaggtccccactctactggggtggaggatcccctctgtgctcactcagggccctcacctttctccttatagggcctaatccctcccttctgctggcctgagaatctctcatgtcaagaactcacatacctgatatggtacagaaaaacatgaggggacccacatctggccatacattcccaggtcctcccggaaaggacaacgagagatgtccaaatttattgaagtccatgtaccctgggtgaggagactgcttggtcctcacctccactcctagtagggtctgagagcctccctctactgccctgagtgcagccccctcagaccaaggcttccccttccctgacatcagtgatcctaggataatggagggacctcagctgacagccctgcccaggctctctgaggtaacagcaggagcagggcagatttttatggggcccccagtccgcattctgtcccaggggtaccctcaatcctccctcagtctcttcacctggatgcttggcagatcctaggaccactgcatctgtccaccacataggggccccttgggggtacaccttgggccctgcagatcctgggattcctccctctgctgacctgaagtcccactcttcagaccacagccctcaactctctggtcaccctgaaggcgcaatgagcacagagcacatttggccactgtgcccagcatcccccagcccaaggttgccactgatctggactccaaggtcccctcagtcctccctcttcttcctccccatgactcctcgcagggctgggccccaaccccctgctgaagtgggtctgcatccctaggattcccgtagccgaatgaaaaggtgcctcggtttgagacaggggtacagtgggccccctgtcctggcatgctgggtcccctcaggactccactgtcttccaggagggcctgggccctttcgctgcctcccaacggccatactcgcgataccgaaccccttccctcccttagccgtagatgtgaacctcaggactcacgtgcctggccgccattcccggagcttccgtgacttgataccaggggcaaagcccggattctgccaggataggggtgggggtggggatgggaatggggaatgggggatgggggtggggttggtgttgggggacgggaatggtggtgagggtggtggttaggctgccctcagttccctctcggggtcctgaccttgattcctgccacagcgtgggccctgacctcttctaaccagccctgccctggccacattaagctctgtccccagagttccccgtggctaaagcggcgggggtcggcggggtgaggtagtggcgacccagcctggaagtcttcccctgcggggtggcccaggcccggcagcagaggcagcactggattatttgaggccctctgtctgaggtgaggcccgcctcagtcctccctcagcgtcttaccttgcctcctcaccgagcctgggccggcttccctccgccgacgtcaggccgtcgctcgttgctcagggcgagaatctcgcggtcttctgacctccaatgcgcaagtcagtggcgtcacatcctggcaacggtactaccctgggttccgggcaggggtggaactggattctgcctggatggggatcggatgggggtggaggtaagcatgaagatggtgatggggcaaggggtaaggattgggacgggggtcctgaggctgtagatcctggtggggtcgggggagttgggggtgggtgggcggggccttcggtcatccctcagggtcctgaagttgatgcctggctgagcctggaccgccatcctctgcagattgcttctgctcccctcagaccaagtctctgactctgagtccccctgaagtggcattgggggaaggggtgtggtctgggtgacatcactgcctgcgtttaccagggctgacaagaggggctgagctggattctgtggtccctctatggtgtgtggggtgggggggcggtgtggaccctcagtcctcactcaggagggtcgttttcgtcacctctggctgttggatgaagtgatgggcaggagatgctctgtttctgtcacctgtgagcatttgcacagctgcaccccttgtagagaatgcctgcgggtcccaggccaggtgctccctgcagggcggggcggcagctcccgcggttgtagtgacctcctatttcagtctttgtgttctgttgaaagaatttttttttttaaaaaatgtaattcctctgccactatggtggtttcaggttgttattagcagaactctggagtcatactgccttaaccaaccaaattttcctggtgtcctgctattacctagggctcttggcatcgtgttttcagaggctgcctcagattgtgcaaagaagtgaagtggaaaatttcaaacttttattctacccattctgtcatctaccgtgtaggccggctacaaacctccccaacatccctgctgctaaccccctccaaccaacactgcaagtgtcaaacacaagtaccagctcaacacagccttgagtctcaccctgggctttccctgttttgttgcgtagattttgttgctgatactggttttttatttactgtttccattctgtaattttccaggtttgatttgggaagcagagcacagcagcccaaatttgttgtaatggcggcggctacaggtaaggcactaaattgtaaataatttaagctgagtttacatttttacagtgttgtgctccccatgaatgaatatattatactcctctatgtatttcaagcttttttttacctgaatatgtcagtatacttcgacagttgtctctataaagaccttatacatttttattagacttcttttcaggcaattcatgaattttgttgctattgcaaatggcatattgtctattaattgttgtagttagttattgctttcgtgaggtgaagattttgattttgctgtagtaatctgttgcacacctcgttctgaaggccgatgcacttgaatattccacataccttttcctttgaattttcaagatcgataatggtattatcactaaacattacatattcttccagtattcataccacttactcattttggtacttatagctctttgtgtctcaatcctgatttcaatcgtagagataatagcctacatctacttctcgttcctgacgtgaatgataattattcgaacgttttgcatttaagtatgtttgctgttgattttaggaagtgcaatttctctttgaatataggttaaatactttttttttttttttaccatgaactcatattaaatttctttaaaaagctttttctgtacccgttgacacaatcaaatttttttctcctccattttgtatgtaaggaattacaatgaaaccgttttttttttttcccctaatgttaaaccgtatgttatttccttgggcagagcctgtttatttaatatgctagtaatttacgtaggatatttgctgctatgtaagggagcttacttaatgtgtgctttttttcccatcaagggtgggatgtggtcctcatctggtttttgaatccaggagggctagtctggaagaatgaattgaacaattgtaaatattttgtatgttctagaagagatgagataagatggtggttagttttccctgatcatttggtagaattggcctccaatactgcctaacctggaatgtttgaaggtggcttgagctttgaacattgtacagtttcagtttttatagtttaattaaagttttctttttctttttggatcagtttggttactggtttattttatttctacaaagtggtcagtttcatttaggatttcacttttaatggcatatttattataaaaaaagttttactagggaaagccttcacacgtacagaataataggaactaatgtaatgaacccaggatactagatacccagcatgaacaactttaaatacacagcaaatctggttccagttagacacttgcctacctgcacatcagcttctggaataacgtggagcgaatctaaggcattagaccatttcatctcgaaataactcaatatgcatttttaaaagataaggacgttttattaaacagaatcccaatagttttcatatctgaaaaattatataaatgattatcaaatattcaactattttacatgcttatctggccgacttatactttataaaaaacatatttctttgatggagtacccaaatatggtaactttcccgccacttgcttcactgtagtggtttcatacatgtataatacagctaggtttgtgtgtgtgtgtaacattctacattctgtcccatgattctccaacttcttaagttacttttagactttacatacattaagcttcactctttgtgctgtaaagatctatgggttttgacaaatgcctcgtgccgttgtcttagtccctttgggcttccataacaaaaatagtgtagactgggtggcttataaacaacacaactttatttctcacattctagaggttgggaagtccaagatcaaggtgctggcagatttcatgtctgatggagacctgctccctagttcatagacagttgcctttcccctatgtcctcacatggaagaaggggcaagggatctctgtggagtctattttataaaaacactgatcccattcatgaggactctgctctcatgaactagtcattctccaaataccccaccttctacctaataccatcaccttggtatttcagcagatgaagtttgtgggaacacaaatattcagatgaaagcaagcatgcatccaccattacagtattaccatactagtttcactgccctgataaatcccctgtgcttgtcagataacccccttggctgccactgataggtgtttcatctttataattttgccttttcctgaatgtcatataaatagactcgcatactatgtagcctttttagactggtttctttcacctagcataatgaactgaagagtcatgtataactttgtgtggctcagaacttattccttttcattgaggagtagtagtatcattgtctggttgtaccatagtgcgtgtgtatatatatatccatccaccaaatgaaatacattttggatgcttctatttttggtgattatgaaataatcttttgtatacaatcgtatacaaatttttatgtagacgtaagttttcacgtcaattgggtaaattgattatgactgctgaatcttatgctgtgttcagttttttaagaaaacgccaaattgtcttccaaagtggctgtaccatgttgcatttccaccagcaatgaatgagagtttctgttgctccacatcttccctggcaattgatcttggttttcttttcttttttttttttttttttgcttttttatggattttggacattctaataggtgtgtagtggtatctcattttagtacacagttatctaatgagaacggattctcagtacttttttatgcttatttgccatgtgtatatcttcttttgtgaggagtgtgttcagatctttgcctattttcatgttttttctgtcgttgaactttaagaattcgtgtatgttgtagagatatgttctttatcacatatgtgtaccaccgatgttttctgctagtctgtggcttctgttttcattctcttaacattgtcctttgaagagcacatgatgtttattttaataaaatctacttggtaaatttttctttcattgatcatgcttttggtgttgaatttaaaaactcaccactgaactcaaagttatgtgaattttctcttatgttttcttatagagggttgtatagtttttgcattttgcattaggtctgtgatttatatcgagttaatttttctggaatatgtaaggatgtttctaggttattataatttgcctgtagatgtctaattgttcaggcaccttttgctggaaaaactgtactttcaccattattgcctttgttgtgaatcacctgactataagtgtgcaggtctatttctgagctctattctgttttattaatctatgtgtgcattctttgctaatgcttatgtcctccaccaaattcatactttgaagccctcagccccggggtgtctgcatttggagatgaggcctctaaggaagtaattaatattaaaagaggtcataagggtggggccttgatcccataggattagtatggttataagcagttagaagagacagaagaaattacttgtgtgcctgcactagctctctctctctctctctctctgcacatgcacagaggaaaggccaagaacggatatattgagaaagggctatctacaagccaggaataaggccgtcaccagaaaccaaccctgccagtccttgatctgggacttccatacttcaaaactgtgaaaaaaaataaatttgttttgtttcagctactcagtccatggcattttgttagggcagcctgagcttactaagacataacctcaggtaacacaatttttttttgttttctcctacagaaaaaaaaaaaacccataattttgacatttaagtctgtggttcattttgagttacatttttgtatggtgtaagatatgtgcgatggttaatattatgtgtcaacttgtctaggctatagtgctcagccgtgtggtcaaacagtagtctagatgttgttgtgaaggtattttgtagttgtgattgacatttaccatcagttgactttaagggaagcagtttaatctccataatgtggatgggcctcatccagttagttgaaggtgttaagagaaaagactaaggtttcctggaaaaggaattctaccgcaagactaacataaaaatgttgtgtgagtttctagcctgctggcctgcctcacagatttgggatatacaagacctcataatcacatgagataattccttatgaaacctttatctttctttctctccctccctttttacatagatagatatgtaggtaggtagctagatagatagatagacaggaagaaagcaattacggattgaaattcagttttgcatatagatatccagttgttctagacccagttgaatacactatcatttctctcctcgaatcttcatttgtatctttatcaatatttgacttatatatatatgcatatacatgtggatccattcctggactttactctcttctttttatgtgtttctaaatttaggacaattccacactatactgattattgttagttaataaaccttcaaatgaagtaggggaacccctctgtatttattccttttcacacagctgataaagcataccagagactgggaatgttacaaaagaaagatgtttattggacttgcagttccacgtggctgggtaggcctcacaatcatggtggaaggcaaggaggagcaagtcacgtcttacatggatggcggcagacaaagagagagagagcttgtacagggaaactgccgtttttaaaaccatcagatctcttgagacttattcactatcacgagaacagtatgggaaagacccaaccccatgattcaattatctcccactgggtccctcccacaacatgtgggaatattgggagctacaagatgagatttgtgtggggacacagagccaaacaatatcattccacatgtggcccctcccaaatctcatgtcttcacctttcaaaaccaatcctgccttcccaacagtcccccaaagtcttaactcatttcagcgttaacgcaaaagcccacagtccaaatcttgagaagttgtcaaaggacactcagttttcttcagttaataatgtaaaaggactgcactgacgtggttaaattcccaggactctcagttctttaggaatggactaaatatctggtatcgtcacttacaaaagtgtcttgaacttgatatagtttatgttcagaaattggttcatattttttatttttatcttttaattcaattttttttcatgagctttttgaaggcccccggatatgcaccctgtataaaggagaaaaattctcgggactactaattttgaccgaaattattgttgatttaatttatacaaacacaaaaggtgatacaaacatttttatagcacctaatgaacatatttgtgaaataaatgcattcaaaaacaaactaaaacagaaaagaataaaaatatacaataaaatagtacacagcaggttgctgattgtggtgacctctgaggtgcgggctgaattgtggaggaactttatacagagaagaattgtgaattatctgtattttagatttcttttgcaacaagaatataggcacaattatcttttaaattacaatatctaaataagcctaacagcaaaaatagtagctgtgtattagtcagttaaagtaactgaagtaactgctagctgatgcaataggcaaaccctggaatttgagtgacatgacaaaacacaagtttatttaatgtgcacatgagtcctgatgtggtttgacagggcctctccactctcccgtgacccaggtatccaggcagcttccacctcgggattccaccacctcaacatgaggctgccatgtttactattagatggagggagaaagcatggaaatggcacactggctctcagatgtctagatgtgacaaacaatgcttctgctcatgtttcagtggtaaggggttgtcacatgacccttcctaactacaagtggactgtactgttcccatgtatccaggaaagagaggaagatgagatgtgggtgagcactatagtctctcccataaactgttgcatagtaggtgctcaacaaaaaggaactattattatttgctatgacaacagccctcttcattgctgggaggagtttcggagaaaaccagattttctttacgttctccaactttttttaagtgtgtactgtatgacagatgctttcaaatacaggatcacatgtagttttctaaggatccagtatacctcagcacctcgtgtgatatactaacttcttcactcactagtatagttagatatactaactatcttcacttactaacacttttctgcactgtcatttgcaataatgtctgaaaccttagtaggctgagaatttctcattcttttaattcatgggtaaaacctcaacctgtgggtctctgctaccctcctgttacctgaacgtctgttcagatgccattagacacattgaaagctatgtctttcctgtggggcagatccacagaccagaagtagtgccaagagagttctttttttcatttctgattttttttccatttctaatcagagctagcatgcctaccgaggaaccacttttcgtctcctaggagaactttagggttttaggaattcagcttcagtagatatttgccccacagtgattttgacagtccttcctcatctgtcacttatgaaggagatgctgtgaactgaactgtgcccccacccccaccaaaactcatatgttgaaaccctaagacccagtgtgatgtatctgtagatgaggcctttggacgtaattagagttagatgaggtcattaaggtggaaccttcgtgatgggattaccgctcttataagagacatcagagagcttgctcgcattctctccttctgccatgtgcagacacacagagaaggtagctgtctacaagccaggaagagaccctcaccaggcatcaaacctgctagaaccttgatctcaaacttcccagcctccagaaatgcgagaaacatctacctatttgtttaagccacccagtggtactttgttatggtactttgttatggcagcctgagctaatacaagaggctttggcttttgaccatctatgtatgtgctctgtggccagtttccaatgagacagcttattaaagtcctattgtaaatataggatggtttcaaacactttctaacttcagggttgtatcccaggaactgatatattataagtcaaaatcagacgctactcaccagctgacttggaaaacattttaagaatgtgttgaagacatccaacaggatgatcagatgtctgaaggtctctattcaaagtcaaatgtatttttgctattagaggggccccagtgtgaggaacagggacagtcaggggacttctccagaaagtagaactgttctatgttaggagaagggcaggtgactcttggctgtcccactggaagtagggcacagcctttaaaggatgcaaccatgaagagcttagcagcaagctcgattccagaattggacaggcaggcacatggggcaagaccattgtggaagggtgctataattcgggaaagtgctgggaatgcacagaaatgctggcacctggacagagttggctctcaaggaaccacagacgattcctaaattgtgttggttctcattgtcaccttccttcatgtcttagtcatttcatgctgctgtaacaaaatgctatagactgggggtcttacacaacagatgcttattttctcccagttctggaggctgggaagccaaaagtcagaatgccagtatggtgggtgtctggtgagggtcttctttctggcttatggatgcccaccttctctgtgagtcctcacatggcagagagagaaagagaaaaatgtgcaagctctctggcatttcttcctataaggacactgatatggtctggatcagtgtccccaccaaatctcacgctgaattgtaatccacagtgttggaggtggggcctggtgggaggtgattggatcatgggggcagatttctcattaatagtttagtaccatcaccttggtactgtgctcatgatagtgagtgatttctcacgacatacggtcatataatagtgtgtggcaatgccccccccgtctctcttgctcctgctttcaccaagtgaagagcctgctccttctttgcctactgccataagtaaaagctccctaaggcctctccagaagcagatgctgccacgcttcctgtacatcctgcaaaccgtaagccaattaaacctatttttttttaataaattacccagtctcaggtatttttttatagcaacgcaagaatgaacgaatacagacattaatccaatcatgagggcctacgctctcaggagctcatctaaccctaattacctcccaaaggccccatctccagaccatcacattgggacttagagcttcaacatatacatttttttttttttttggaggggagcacatttcagtccatagcacttctttaggcatactttttgtagcttgaccacagggtccttcttttggttgcctgagagacgtggattcctgagaagtaaatagcaagacgaaggtctgcttcaggttgggacgcgaaggaatgacatacactcagatgaattcggaccatgtgtattagtttgctttggctatcataacaaggtaccacagactgggggagcttaagcgtcagaaatgtattttcccagtcccggaggctacaagttcaggctcaaggtgtgggcagggttgagttgtcctgaggcctgtctccttgacttgtagatggccattctcttcctgtgtcttcacatggtctttcctctgtgtgtgtctgtgtcctaatgtcctcttcttataaggacaccagtcatattggattggggcccatcctaatctagcagggatgcaatcccaaccgtgttgcttattagccatgtaattatggggaaatcatcaagccgcatgagcatcaggttcttcatctgtgaagcaggtttgataaagtctgtcttataggacttttggagtgtgtgcaatgtaagtaaagcacttggctcagggcctggcatatattagatcgttaatgtttggcagttatttgtgttactatttggaactcagatcctaccatagttgcctctgggaattttgttgttgctgttgttattgttatctaggaaacctcagagtacgtagcacaacagtacagagaatagaataccaactcagcccaaagtgttgcttcatagacaaaacacagtagaatttccctcctagaggatctattgtttaatttgtgtgtggaggagtcttcttcagctggattgcagctcagtgttcctggaacgtgagtccaggaccaactcttttcctccctctcagctgcttttccatctcaaccactattttcattcatataatcaccacgcaaaatctagcccatgctcaggaatggccaaattacacttgagataacctaattagaatgccatttgactagagtcagctctagctctcccactaaggcagaagagtaccttgccagtggcttctgggcctcccttcctgagagattcacccttacctcccaggaaacccttgcagatgatgagtatccatcacctagctcttgggctgtattcaaccgcactgggataagagcacaggatgccttccattcctgccccaggtggaaactcgtctatgttcatccaccaaccataatgaactgctcagagcagttttccattccaggcttttctctccctgagaatctgaccctggacccaccagcttcattagaatcagcttcctccgaaggaactgcagtttcccaaagcccaaaaggccctggctcagggcatttacactccaccactctcaccgggagcaccacacattctgccctctcttacttttcctctaggtcttagaggaaatctcaccaacttaattttatgactatagctcctagaccctaccacccttcgggtaggggtgggtctgacttatgccagtatctccagtaacacagtgctttccaaagagcagatgctcagtgagtgtttgagaaagaatgagccagtgaccaggacttccatttaagatataatttctcctacatccttgaataagccaagaaaatccaggtacacatatatggcttaattttatagaacagcacatgaataaaaagctgagaattaactgtcttttccttttatttctattttttagagtaaagtgagagcaagtttattaagaaagtaaagaaataaaagaatggctactccatagccctgagggctgctggtcgccttcttatttttatttttatttttatttttattttttttttgagacagagtctcactctgtcgcccaggctgcagtgcagtggcgtgatctcggctcactgcaagctccgcctccctggttcatgccattctcctgccccattctcccaagtagctggactgcaggtgcctgccaccatgcccggcaaattttttgtatttttagtagagacagagtttcactgtggtagccaggatgctgtcgatctcctgacctcgtgatccaccccctttggcctcccaaagtgctgggattacaggcgtgagccatggcgcccggctggttgcccatttttatggttatttcttgattatatgctaaacaaggggtggactattcatgagttttccaggaaaaaagtggggaattcttggaactgagggctcctcccctttttcagccatatagggtaacttccaaacgttgccatggcatctgtaaactgtcgtggtgccggtgggagtgtcttttagcatgctaatgcatataatgagcagtgaggatgaccagaggtcactctcattgccatcttggctttggtgggttttggctggcttctttactgcaacccgttttatcagcaaggtctttatgacctgtatcttgtgccgacatactgtctcatcctgtgactaagaatgccttacctcctgggaatgtagcccagtaggtctcagccctattttacccagaccctgttcaagatggagttgctctggttcaaacacctctgacatttccctcctcccttttatctgagaacctttattcctaagggttgtagagggatgaagatccatcttctgtaacttcttcaggctgaataggggtgatgatattactgcctaattatgagagtcttttgaattcaggacagagaggagctcagtcagaaagcgtcagtttggtgagggtcatacacaactctgagttctgacaaaacatgttatctggaagattaataagtgttcagtttaagaaaacattgagtaagcttatcctgcactcctgcaccaagaatacaacaccagtgtattccacaacagtaaagcaaaataagtaaaattatcccaaggtaaactaagtaagaaggctttccttgaactgggcaactgttagaaccaggctgatacggggtcactatctgatttcaatatgtgcccagaactagaatattgatccagatttttacattacccatccctcttgcttcttctaaatagcagtcagggatcactgattggttcacaggaataagaaaagtgagtctaaattgcagaaaaaaactttaaaacaacgaatgaaactagaatctaataacaggtgcaccatagtttttgcaacatcatatttttttctctctccagtctcccatttttactaaagacaaatcatggtaagactggtttgttttattatacttggcctgatcatttgtataaagtgcagcaagaataattatttttcacatacgctctttatatttttatttttattttatgttttaataggaggcagtctcccaatgttgcccagtctggtctcgaactcctgggctcaagcagtcctcctgcctcagcctcccaaagtgctgggactgcaggcatgagccaccacgcccagcctcacataagctcttttaaaactggctttgatgggccgggcatggtggctcacgcctgtaatcccagcactttgggaggctgaggtgggcggatcacctgaggtcaggagttcaagaccagccaggccaacatgttgaaaccccatctctactaaaagaaaaaaaaaattatatatatataaatacacacacacacacacacacacacacacagacacacacacacacatatatacacatatatatgtgtatatatatatatatgtgtgtgtgtgtatatatatatatatatatatataagattagccgagcgtagtggtgggtgcctgtaatcccagctactcgggaggctgaggcaagagaatcgcttgaacccaggaggcggaggttgcagtgagccaagatcaccctcctgcactccagcctgggcagcaagagcaaaactcggtctcgaaaataaataaataaataaataaataaataaataaataaataaataaataaatgaaaataaaaaataaaaataaatggctttcatggagctctgttccatagaaggaatctcagataagacctttttaaagctgagtccagcctggggtgggtgccgtcaaatacctctgagttgggtaaaatcctctcctcttgaggtcccaagataacttggggctcctgggcctgtcagataatgacattctttacttaccacaggtcagtaaccctgcacagggactgtgtagacaagttatgaggctagttttcccaaggggtttttattggctctataagtcaagtttgatcccttaaaggaaagaacaccattccagtcaaagccttggtaaaataaccagtttctccaattgtgtcttgttgcaaaagaaaacagattcttattgcacttatgcaaataactatattgctataagttaagaatattcacaagcagtttccaaattctagagaaattaggtagagagaaacaaatatgctctgaattttgttcacagaagtatactttactgaattgttaaaagctgtcaatagcccagaagaaaagttttcctgactccaaagtctgccagtcagtgctgccgtctatttcctttgggtcagggggtttcctcagtattgtcccttcagggttcaccggaaagatgttactggaatggggtcccagtgcagactccaaaagagggttcttggagctcgtgcaagaaagaattcgaggtgaatccatagagtaaagtgagagcaagtttattaagaaagtaaataaaagaatagctactctacgggcagagcagcctatcttttccttttatttctctgtttcatgaccccatcaatttttttgctaatgtatttcattctccaaggaaacacctattccaatgccatggcatcttgttccaaaccgcaaaaccagatgaagggcttcccaatatgttttacaaaatagcaaactcatccaaatagaacagaacacaaagacattatacactgagttcccttccacccaccgtgcctttcactagtgagaacgctgactgctctctttagagtgaagaatgggcctcatgtcacacagggtggggaagctgctggatgtagccctggaacgtgcactagtccaccccaccctccactggccctggctgcatcgcctgctgaaactctctcttcctcatagcatgcaggatcacttctgggcacctgccagtactccaggtaattttcctgcacccaatcccgggtgagcagcttcctgggctccccatagatgaagtgctccctcccagcatacacctctatcacattcagggcttcccacataacctcctctggggcgcagttgccctccgtgaagatcacacacaggacaattattaggaggcccgtcttgggcttgctcgggtcatcaaccagcatgccatcataggagaggcccagagaggtgacaaggacataggaatggccggtggggaccacttccttcacgtcgatgccaaagatcagctgcatgtactcggaggattccttgaaaatgaaagcgaagtagtcttcgtgatttttgatgacactatccaccatttctgcctttgtgactgactccttaattcgaaacttgtggagcaggacactaactaaatcagacaccttgtcagagtgcctctcggaggaaggactccatgacacttgggatgggcaaggtgattggctcctccttttcttggctgctggagccctcatcggattggttccatagagtgttatcgatggtagtgggggaggaggaggctccctgcatactctggggaggactcagtgcctcagcagcacacaactcctccagggtgcccatgatcagactagaggaggaagaggcagcctcctcctcctcaggcacaggaccctgcccacccaccaggccagggacctctccttgggcctcaaggccttcctcaggcatgtagtgctgactcctctgtccaagaggcatgatgactctggtcaaggcagcaagcgggagtgtgggcaggagctgggtaatggggatgcacaggcctggggagagagggagcgtgtgagaggcctcagctaagaaccagactttggaggaggctctaacaaaggcctacttacggatcttctccttcagtgctcctctggggcctcctggggctcctgtcctcctggtcagcctgtcccctgagaatctgaagaaagaagtgacacagcttctcaggttacagccagccagcagaggccaaggccccaaggctgagggtagggcaggtggggctgggcgctctggggtcccatccattatgggtgggtgggacccttggtatacattcagggtgaacacctcaccttgactgctggcactgcctgggtctcctctgctctgtggcttgaggacactgactcagactaaagcctcacctccaagttcctggagctcctggaagagggatcaaggggccctcagggtgcaggctgcaagcacagcctcagtcccccgagtgctgtcaggagggtgggctggactctgtcagttccctcactcttttgcatagatggccccttctatgctcactcaggaccttcacgtttctcctagcagggcctgaatcctgcccctttgctggcctgagaaactctcagatcaagagctcatatccctgatatggaacagaaggacatgaggggacccacatctggccacacctgctcagggcttccaggcaaggacagtaagaggtggccatattcagctgggtccatgtgtcctgagatgaggaacctgcttggtccacatcttgatgcctgcagatcctgggactctccctgtttacctgaggccaccaccttaaatcaaatccctatctccaagagacaccagtaaaggaagtgaggggattccatccacccactgttccctgcagtttcccatgcctgacagaaaaggcagggcagggctgggtcatgtgcattcgccgtgtggggtccacttagtcctcaccttgactcctggctgagcctgggaccctccctctgacctaaatgcagcccctccaaccaaggcctccccctccctgagaccactgatcctggtataagagagggggcctcaactgacagctctggccatgctctctgcggaaacagcaggggcaaggcagatttctgtggggcctccatctgccttctggtccagcggtacccttaatcctccctcaggttcctcacctggggtcttagcagatcctgggtccgctctgtctgttaatcagatgggggtccctgtgttggcctgagtaacccactgagaactaggtcctcacctccctgagatcccaaagccgacatgaggaggactcacatcccgtcacccctccatggggtgtccagggctgacaccaggggctgcccccttctgttctggggtggaagttccaaagttctcctgtgggttattcatctttactcctgccgggacctgccgttcctcaaccctcagccccctgagatgagcagacatctcccctttacaccaagaccacatctccctgagggttctccaacttcctgcccgtggcacaagtgagattgccacttagggccaccctggatcaggtccccccagagctaagaacaaggacagcagactctgcggggtctcttctttctgggctgggggtacctccagtcctcatgaaaggtgcacaccgtgggtcctgcagatgctgggactcctccctctgctgaccaggtgtggctccctctactggcctgtcagtgtcactgggaccaaggtcctcacctccctgagacctcccacctccaaccacatggcagaaatgagagcatgccacatgccatccctgcctgtggcctcccagggctgagaacaggggaagctgggcggctctgcaagttcccttcttctttatgatgtggaggtaacttcttaccttcagtccttaccaaacttcctccccttcactcctggaagaccctggactctatccggtgctgaccaggtgtggctacctctgctgagcggaggacgcccctcagaccaaggcccccacctcactgagacccgggaggtagaggtgagggggcaccacacggtcacccctgcgtgggattcccaaagctgacagaaggtgcaagtttcagggggccctccgctgtctgggtgtcttccaggtgttcagattgagtcccgacagggcccggctctttccctcctgctgaactgtatgccaaggccaccatgtccctgataccctcagggagaaagtggtgggacagcatcccttccccacagtcctgcccaggcctcccaggactgacagtaggggcaggtttcctaagtctgggaagaaaggtcttctgagtcatccttcagagctctgggactcctctctctgctgacctgaggccccactccccagaccacagtcctctcctccctgacaccccaaaggcacagcgagtccaggccacatgtggccactgtgcctgggacctcccagggtcgaggtccccactgatctggactccaagttcccgtcagtcctccctcttcttcctgcccttgactcccggcaggcttgggccccaccccagcctgctgacctgagtcttcatccctcagattcccaaggccaaatgaggaggcacctcagtctcaaacagggggtgggtgggccccctgtcctggggtcctgggtgccctcgggcctctctcaggcctcccttgtttcccagcagggcctgggccctccctctgctccccgcaatccgtgctcatgatatgaagccccttccctccgtcagccctggatgcccatgccaggatccacatgcctggccaccatgcctggaaattcccagggctgacagcaaggacagagccccgctctgtggagccctcaaccctctctgagggtcctgaacgtgatggctggcagagcctggctgctgccctctcctaggcagccctgccctgatcacaccaacctctgactccagagtcccctgaggcttaagtggcagagagttgggggcggcccagcctgagaagtccgcccccgggtggtcctgggttggcagcaggggtggtgctggattttttagggtcctctatcttgggttgcaacggggtgtccctagtcctccctcaacgcctcacctttccttcacacacagcccgggcccgctttcctccgccgatcttaagccacccctcaaaaccaggccctcgcttccctctgatccctgaggcgcaaatcagtggcatcacatccgggcacccggggcttccctgcgttgacagcaggggcaaaacctgattctgtcggggtgggggtggggatgggaatgggaatggaggaggggtgggggcgaggatgggggtgaagatggggatggggatggggatcctgaggctgtaggtcgtggcggtgacggtgggcttgggggtgagggaggccctcagtcgttcctcagggtcctcaccttgaaacctggcagaacctgggccctgccctctcctaaccacccctgccttggtcacaccaagctctgactccagagtcccctgtggcataagcggcgggggttggcagggcgccggggggtggcccagactgagaagtactcccctaggtggtccagggctggcagcaggggtgacgctgaattatttggggtcctctatctggggtggaggcgtcctcagtcctccctcagcctctcaccttgtcttctcacagagcctgggtccacttccctctgccaatctcaagccgcccctcagaccgagaccctcgcttctctgaccccctagccgtcacatccggccaccaagcctggggcttccttgggttgactgctggtgtcatagcagattctgctatgagtgggggtggaaatgggggtgggggtggggggtcgaggtcgagggggtgggcactctcagtcatcctcaaggtcctgaccttgatgcctggcagagcctggatcccatcctgtgtggatggtgtctgctcccctcagaccaaagcactgactccgagtcccctgaggtggcagtggagggagggatatggtcggggcgacaacattgtcagggtcttccagggctgacaggaggggctgaactggattctgtggtccctctatgtggggtgagtggaccctcaatccttactcaggagggttctcctcttggctcctggctctttgatgaagtgatgggtgggggatgctctgtttctgtcacctctgagtattcgcccagctgtaccccttgcagagaatggctgcgggtcccaggccaggtgctccctggggagctgcagtgcctgcgattgtagtggcctctgggagaagacacacaccttcccacgggggctcctccccagccagaagtcgacttgtcaaaccttttgtcctaaagcatttatttttacactgaagaggctgagcagcagcaagagaattgaggagtcctgcatttggaatttttgtgacatttaattgtactgtttagtgacgtgcatattttaatccgcattcacacagtaagaaataaattttacatttctgctaattgtatgtgtacattatatgtcatatatgtagactatgcttatgtttagatacataaacatgtatgtatataagtttgttatatatgaataattttatgtattcacactatatatctttacagatatatatgtacatatattacatatacttatttcattaaacaatatctactcatactatgtatgattcactcatgctattccatttctagttcattgtttatattctatttaaattacatttttggaaggccaggcctcacctactaagttggtgtcaagtgggtattaacagaactctggagccatcatgtctcaatcacaccaagattcctggtgtcctgatattaccccagggctactggcatcacattgtgagatgctgcctcatattaggcaataatatggggtgggagtttaaaataatttttccttctacccattctgtagtgtgctgtcagcgcaggctacagacctccccaacttctctgccactaccccatgccccaaacacaagtagcagttcaatgcagtcttagtctccccagggatttctctgttttgtggtttagattttattgctaatcctttttttttctttttccattctatacttttccagaattgattttgggaacagaacacagcagcctgaacttgattgttattttggcagctacaggtaaggcactagctctgtatataatttaagcagaattgacatccttgcagtattctgttttccatcaatgaatttatgacactcctccatttatttggaaaattttttccagaatctatcagtaaacttatacagttgcctccgtgaagatcttatatatttttgtgaggcttctgtttaattttggattttattgcttttttgaatgctatattttctgtttcatatgttctaagttgcttttgtgtggcaagcctcttgattttgctgtagtgaactactatttgctggtttctgaagcctcttatttatttgaatattccatgtgtcttttcctttgaattttcttgatagataatcatattctcaacaaatattatctttcttttcaatcttcatacctctttttcattttgatatccatagctctgactcttttgcatttttgctacccactgcagctatggacagtagccatgacagcatatgtcaacgacttgtgtctgacatgaatgtgaatgcttcttctaaaagttcatatttaaatatggttgctgccaattttaggaaagggaagttccttttcatcttagtttgctgaaagttgtcaatttgaaatcacatagtatttctttcagaggctttttctgtactcatcgaaatgaccaaatgttttttctactctatcttgtatgtacagaattacaattgaattgtttctaatgtgaaataattcttttggcttgaaggcagaacaagaaggccaaacagaagcctccaccaattgtcctccctgcaggaagatcaaattgaacaactatccacacaaagaagcactttaatgagaatgaaaaatcaggtgaatgatcatagtacctggttctaacttcataccactgaaaggggcactgaagatggtaggagagacagtcttgaattgctaacaccatccctgccccatctcccagtagctgctgtgtggcacggaaagagaatctgtgtgtttaagggagagagagggcagtgattgtgggactttgcgttggaactcactactgccctgttacagcagaaagcaacaccaggcataactcagccggtacccacagagggagcatttagaccagccctaaccagtggtcagaacctgagttccacaagcctcaccactgtggactaaagtggtccgtggtgctaaatgaaaggcagtctaggccacaaggattacaattcttgggcaagtcctggtgctgggctaagctcagagccagtggacttagggggcatgcaccctagtgagataccaactggggtggccaagcgggtgctcgtaccacccctccctcaactgcaggtagtacagcttgcagcttgcctgtagtctcagctactcgggatgctgaggcaggagaatggcgtcaacctgggaggcggagcttgcagtgagccgagatcgtgcgactgcactccagcctgagcaacagagcgagactccatctcaaaaaaataaaataaaaaataaaaataaataaataaagtagttgatccatgggtagatatatacatacatacaaatacgtatatgtgtgtgtatgtatatatatgcacagtagaaccagaactgttaacccccatccttgtgggaaacagacttatcaactagactgcagtgcttttcactatagtgcttctttcacttaacgctaagctcatgtgtttctgttgcttgatagctcatttctttttttcacgaataatgttctattattgttggaccacagtttgtttatccgttcacctactgaagaacatcctggttgtttccagtttttagtaattatgaaataagttgccatacacccttgtatgcaagttttttgtgtggaagcaagtttgcaaactagttggatgcatacctaggaatagcaagacttgtgttcagctttgttgaaaacaaacaaacaaacaaaaaactgacaaaccatctttgaaagtggctgtaccagtttgcattcccagaagcaatgagtaagagtgtctgttgctccttagtgttgccagcaagtggtattgttagacattctaatagctgtgtatctcattgttatttaattcacaattcactaacgaagaatgatgttgatggtcttgtcttatgcttatttcccatctgtatatcttctttggcgatgtgtctgttcagagtttctgcccattgattgagtttttataaatttgttttcttattgttcagttgtaagcctcctttgtagattttggatacagatcttctatccgatatatgttttgcaaacacttggtcatagtctgtggcttctcttttctttttcctaacaatgtctttcaaagagctttcgaggtttcttttttatttttagaaagtctaacttatcaattttgcctttcatagaccacccttttgatgttgtatctaaaaaatttatcaccaaaacccaggtcatgtagatcttcccctattttcttcaagaagttttataatattgcattttaaatttgagtctataatatactttgaggttattttttgtgaaagatataaagttttatctaggttcatttctttgcatattgagatccatttgttcaggtgccctttgttgaaaagactatcatttctctataggattatctttgcatctttgtcaaaaaatcagtaaactatatttttatggatctatttctattttgttccattgatgtgtgtccattcttttggcaatatcatactttgtagattgctgtacctttacagaacaagtggtgtaccgaagctgacatcaaccatgagaaatcatatttctaataggttccttttacatgatgtgaagagaatggcattttacctctgagatcttccccctggaagttcatactctcattctaatcatgacagacgtataagacaaatcccagtagaagggctttatgcacaatagctgaccaatgctactcgaaactgtgaagatcaaagtcatcaaacgtagggaaagtctaagacctgccacagctaagaggagcctatggagacatgacgagtaaatgtgaaacgatggtcctacatgaaactctggaacagaaaaaaaaatgcattaggtaaaaacaaaggaaatctgaataaagtatgtgctctggttaatagcaatgtgttaatataggttcaatagttgtaacaaatgtaccatactaatggaaaatgttaataatagaggaaacggtgtagagcataaggcactcaatactaggttttctatttttctctaagtctaaagctacaggttgattaacaatgaaaaactgttagcaaactacttaaagagtatttaccaaaaaactacagcaaacatcaaaaagttgaaagttacttttactttgaaattgtaaaagacaatgattcttgctatcaccatttctattcaatactgtaatagaggtactagccagtgcagtaatgctaagcagatgaaatcaaagggctagagataaaaaataaacaaaatttgcctaattaacagatggtttttagattgtgtataaagaaaattcaaaataagagtaaattattcatttaataaaatatatataaaagttgcaggacaaatatcaatttacaaaaaaattaagtttctgcagtaacagtatgaaaatgagaataaacaaaatataccttgtaaaatgaatctaaccaaagaaagcctaagaacttcatggaaattaaattaatgaactaattaaggctttaaatataaaataaatggatgtgagtattcaatattgtagacatgttaattatttccagaagtaatgtacagatgattgcaatcccaatttaaaaattaaagtctttatgtgtgaatgtgtgtgcttacatacatgtgtgtgtaaaatattgcaagatgactctgaaatttaaattgacatgtgatatagtttctatatgtgtccccacccaaatctcattttgaattgtaatctccattgttggaggtggggcctggtgggaagtgattggatcatggggctggatttctcatgaatggtttagcgccacccccttggtgctgttatcgtgatagtgagtgagttctcgtgagatctggttgtttaaaagtgtgtggcatctcccctgcctctctcttattcctgctctggccatgtgacgtacctgcttccgcttcaccttctgccatgattgtttcatgaggcctccccagaagctgagcagatgccagcatcatgtttcctgtacagcctgcagaaccgtgagccaattaagcttcttttctttataaattatccagtctcaaatatttctttatagcaatgtgagaacagattaacacaacatgcaataggctaagcatggccaagacattcttgagataaaagaagataaaaggagttcctccaccagatagtaagaatgactagaaagctctagtgataaagaatttgtagtatgggtacaaggtgtaacaaatagaacaatggagctgaatagagattcctgaaacacacccacttaatacatggacttttgatttatatatttaaaaagagcaggagagatagggcaataataaaactataacttttaataaatgacagtgaaacaactaaatatccatgtagaaaacaaaatgtaacaagaaccctccttggaattacacacaaaaattaattccaggaggattaaagaactactttttaaaggtttcctgtaacttttttcaaatatacataaaatacatggaatggtaaaaatgagccttcatatgtttctatcatctagagagcaagcagtatgggtcaaggagagcatcgataatgctggaggggaaaggactgaaagaggctagggacattggtcagtaccagaagggttggagatgatacaagtcaaggaggaagggggaaatggcagctccttctgccccttgtctccaacacagatgaccttcccaccctcaggggtcttcgttttcaaagagctagacctggtggctagacaggaggaggcttaggagaaggctgcctggaccagtgatttgttcattccatctctcaccacagcccctgctgatctctagagccctggagctcagagaagtgtgacctgacagtatgattcctgagacttctgacaaggcttgttgggctaacaccctgaccaggcccaggaggtctctatcaacttagaggcagtgccaggttgtccacatgtgatgggagtaaagtgctacctcctcctcatctgggtgagagccattggtgggaagaggggttttggggccttggcttctctccttttttgctcattgcaaggtgtcctccagatcctgttccttgacagaaaaccctcgctgtagacccccactagtgggacttggagtacttaatggagcaaggaagggggtctccctccttcctgagatcagaggtactctaagtgtggagaagacaggtatcatgggatgagcctgaactaattacatagtggccagagggcctccaggaatgaagggctttccccatcagcacatgaactaccaccggtatgggcaggattttcctaacagtgttttttagagagtagttattaattttaataatgtctaagttatccattttttctttcatgagtcatgcttttggtgttgtgtctaagaagtcacagctaaacccaagttcaccttgattttcttccatggatggggagccaccagtgatgctggttggagggcctttcctccagcatgtgaactaccactagtctggggagttgggtcatggaagaatcttaatgaagactctccaccatcaaaatgggatttggagcttctggttggaaatgcttcaggctgacaaacagcctctgaatgagaatagggtcacccaaaatgagccccagggtgatggactaagagggccttataggaggaagggcgccatcttgatcatctcatctacccatgattaacacccacccagatcaatgcctgccccacctctgctccatgtactttcttttagctgccctcgctcttgacagggccctcagcagtattcgggaaccctgagattctaaaagaggttgatttgtgtttttgtgaacgagttcactgaaggtatgagtcatctccagatttactgtgcccaggccaactcaactgttgcggagtttgctttcttcctcagctttggcttcagcgtctcaggtgccgttagcctatcttgtagccagaatggggtatataacctcagaggtgaaggtggaaaatcttgggcatttcttttacaatgatttatctttgcctcccagtgtcagatccacaaggccaacttttctcagatcttcactgcgagaatatggtggggttcctggagataaagcctgtaatgtttgccccttaagactgcagccccaggtagtttatcacttacattaccccacactcagctttcagaaagtcatcaaaatcaccatttagatgttcttaccagtttatggctccagcagcttctgctacaggtaagcagatcttacctgctcctctttgtgtgaaccagtcgctccacattttcagtcagtggtttgccctgcaatctcagttctctgatgggtgtaagaaaaagttttcagtttgtcaagcattttgtaagaatgggagtgccaacttacaactgtatatcctttttactggttgctttagttattatatatacctagcttatctcactctactgttgtcaacattttaccagttcaagtaaagtgtagaaacctcaccttccttcatatccctttacccttctccatttatgatgtgattgtcttaagtatttcttatacatacatttaaagacatattaggccattctataatttttgcctcgactgtcaaacataacttagaaaactcaaagaagaaagaaagtctattgtatttatctacattttgtttaccatgttctttcttccttcccaatgttccaattccccattaccctttttatcatttcctttctgtttagggaacttcctctagccattcttctagggtaaatctcctggtgacaaagtctattagttttccttaatttgggaatatcttgattttcccttcattcctgaaagatatttttgctatatgtagggttgtgttgactgttcttttctttcagctcttgagagatgttgtgcttctttcttctgggcttcatggtttctgttgcaaacctcactgtcatttgaattattttccctctaaactgagatgtcatttctctctcgctgctttcaagatttttttttgtctctaattttcagaagtttgactatgacgtatcttgacttggatttattctccttggattcattcagcttctcgaatttataggtttatgagtgttgctaaacttggaaagcattaagccattatttctttgagtacctcttcagccctattctctttctcttttctttctggtattctagtgacatgaatgttcaatctttcgttatggtccctcaggtctctgaggctctgctcatttttatttgatgtattttttccctgttgttcagactgagaaatttctattgttctatctttcagttcactgattgtttcctccgtcatctccattctgctttttagcccatccattaagtttttcatttcagttattgcttttttcagttctaaaaacatcaattgatttttctttatatgtgctacttctttgctgagatattctattttttccaattgtttcagatgtgtttataattgcattttgaagcatttttataatggctgatttaaaatctttgtcagataattctcaatgtccatcatcttggtgttgatgtgtactgactgagtttttattcagttcaagatcttcctgtttctgttatgtgaatggtttttgattgagctattgatattttggttgttatgtcatattattctggatcttatttaaaccttgtgttttagctggctttctcagacatcactctagcaaaagagatagggcaccacttcattactgacatatggaaatggaagatcaagttcctcacttggcctccattgacacccaagtgggagcccactcaatactgctgggtttaggtgggagttctggccccatactagggctctactgatacctccttgtttgggaggggtgagtgtttctcattactcttccccatgtggcctctgctgacaccacaggttgtagggatggtctcattgttcctggacagtggtgaaagtcctcactttttatgagacctcctctgatgacaccccagtcaggagaggaaagggcgacttttatctttgagtggaagtgcaagttccccacatgagctatataaacaacatgctgtggggagggaaatgcttcattactacatgctgggaataaaagctcaagctctctactcagtcacctctgacaccactccagtgctggtgagggggtacttggagcccttgatatagcctagtgagggtggcaatccaggctcccctcttagcctttgctggtgtggatgtgagtggggccatagattttttgtatgtgttgatatttggtgagagtagagcagctagtgtctaaaagttttctgttttgctaggttacccttttcctgattttttggttagagagagaaggcttttgttgaggcttctcccctcaactccctgtacctgttggcttatttagctccatttctgggatatataaggcataaagaaaacacagggaacctcagcactttgggaggccgaagtgggcagatcacgaggtcaggagtttgagaccagcctggccaacatggtgaaaccccgtctctactaaaaatacaaaaattagctgggcgtggtggcgtgcgcctgtaatcccagctactcgggaggctgaggcagaagaattgctcgaaccctggagggggaggttgcagtcagccaagatcatgccactgcactccaacctgggtgacagagcgagactccgtctcaaaaaaaaaaagaaagaaagaaagaaagaaaagaaaacacagggaactcaccgctatgctatgttgttccttggattccaaggtccctagccagtctcctcttttctctaccattcagacccatcttactgcttgttttgtgtataacattctgggcatttagttgtgcttagcaggagaaataggagagtactccatcttcccagaagtggaagttgaatccctacagataattttaaaacaataaaattaataaaagccaatcttgatttttaccaccatactccagtatgtctatataatttctgtgataaaatgctcttcccccaatcttttatccttattttttcaaaagttatttttctcttcagggaattgtcaacctaattatatggagagaggctctttaaaagaaaatttgggaatagagcattgcagtgggattacacgtgccacagtaaatgatgtgtattcagagaggtaaaggaagacaaaggttttaaaaggaaaaaatgaggagacttacataattcctttgaaataattatccttaggccagtcgtgacagttcacacctgtaatcctagtactttgggaggccgaggagggcagatggcctgagctcaggagttcgagaacagcctggccaacatggcaaaatcccatctctacaaaaaatacaaaatattagccagatgtggtggtgcaggcctgtggtcccagctacttggaggctgaggcgggaggatggcttgagcccaggaggcagatgttgtagtgagctgagatcgtgccactgcacttcaacctgggtgacagaatgagaatctgtctcaaaaaaaaaaaagaagaaggaaataattatcattgactacaaaggtcaataacaagggtgatgccaggccaaggttggacaagcagttgctaggcggatgccctcacagaagtattttttgcacaaggtggtaatggcctttgtacaaggctgtaggttttgcagactcttttgttatcaggcattcttacatgataacccttccttcataaccttttgcagctgtatttgtcagtggttttttaacattagtgactccattttgattctgacaactttcacagaatataatttctaaaaatagttttattgagatatacttgatatatataatttggccccaaacccagaatacccacctccctcccttcccacaccaatgcctcttccttcctccctccctccccaccatttgagaatatacagacccacacatcattttacaacagttcattttattttcatcaccctgtggggcgcaaaatgtactctagaccttgttggctatttctccggcgggggtgtggggggcgggtcagacctttggggacttctcagatagatttgagtctcttgccttgccctgaaattacaggctgcgcagggaaatgctggagatggtggaggtaggtcttctggcttacttggtcctgctgtggctgatttttattgagttccttattcagctggttacagtggctagatagtgttggcccacttccttcctcaggtttgcttgaagcgggggtcttttagggagaagcttttttcctggaactccctcacagggttctttttccctttcaggttgtcttgggaacctggaaggacagcagggagatcacagaagggaattggttttgggggagaggatggaagaggggtgggaacagaagcttcatgagaaggggtgcaggctggggtgggggttagagccaggacaggacagggtaggagtcggagcttgagtgggccactcaccttgatagggcttctgggcctgggttgagatgttggcaaggatgtgaatgtaaaatggtacagtcactctgaaaaggagtttaacagtttctaataaaactaaatacgcaatttgcatatgaacataaaattaggctattggccattaattacggataaataaaaactgtccacaattagccagacatgcaagataagggttgcatcaaggttgaacactgaagacaaatctccttaagtttttatttgttgtaataaatggccaatagcctaattttatgttcatatgctaattgcatatttagttttattagaaactgttaaactccttttcagagtgactgtaccattttacattcactatcaatatatgagtgatgcaatttctccacatccttgccaacatttggtaccgtgactattttttattgtagctgttatgagagattatagtgatatttcattaaggttttgatttgcatttcccaatgggcaatgatgttgaacatcttttcatgtgcttttctgccatctgtggattctccgcttttttacagtgtctagagcttctagtactatgttgaataagagcgaaaagatctgagagcaatcatccttgcctaattttacgcggaaagcattcagtctttcatctgtaagtaatgatgttatctgtaggtttttttttttttgtacatgctccttatcaacttgcagtaatttctgactattactaatttgctgagagtttttaaatcataaatggatgttgaattctgtccaattattgtttctgtctcaaatttgcctacttgtggtaagttgttgaaatttttggcacaagcttgttcataatattctctctcttttttttttttgagacagtcttgctccgtcgcccaggctggagtgcatgggcgcgatctcggctcactgcaacctccacctccctggttcaagcaattcccctgcctcatcctcccgagtgggattacaggcacacgccaccatgcacggctaaattttttgttattttgagtagagacaggttttcaccaaattggccagactggtcccgagctcctgatctcaggcaatccgccagcctcggcttcccaaggtgttgggattacaggcatgagctaccgtgccgggccaacattttcattattttttaatggctctaggatctgtggttatgttacctatctcattgctgatattggtaatgtgtgtcttctctcattttgttctgagctgtctgtttagaaatttactgtttttatttatcttttcaaggaacaagtttttagtataattgctttcttcacggtttttctgtttattaccctatattgactttaatttgctcttctttttctagtttcataaggttttctaatataagcacttagatgtccttctaagtactactttaattgcatgccacaatttttgaggtattgcattttctttttttaacttttattttaagtttgaggtacatgagcaagtttgttacataggtaaagttgcgtcatggtggtttgttgtacagattatttcatcacccagatattaagcctagtacccaatagttgttttttctgctcctctccctcctcccactctccagcctctaataggccccagggtgtgttgtttctctctagtgttcatgtgttctcatcatatagctcccacttataaatgagaacatgcagtatttggttttctgttcctgtgttagtttgctaggataatggtcttcagctccatacatgtccctgcaaaggacatgatctgcttccttttatggttgcataatattccatggtgtatatataccacattttctttatccagtttcattttaattcagttccaaaagtttttaaatttcccttgagacaaattatctttgatgtgtggattatttagaagtataattttaaatttccaaatattttttaatttcccaaatataattctgttgttgacttctaacttaattctgctactgagcaagaacatacctttattacttcaatcctttttatttacttagacttattttatggcccaggacataggctatcttggtaaatgttctatgtgcacctttaaaaaatgtgacatgagtatgtatattgatgttgttggatggaatgttgtgtagatgtcgattatgttacgaacacagataatgctgttcaagtcttccatatttttattgatgtttgtgcactagttctatcgattattgaaagaaagatattgacatttctaaatacagttgtggatttgtctatttctcctataaataattttttgcttcatttattttgaagttctattattaggtgcatacacatttagaattagtatgtcttctgggtagattggctcctttgtcattatgaaatatctatttttaatccctgataatattccttgctctgaaatctatttcatctgatgttagtatagttaattcatgttctatcatttagcattcttttatttctgatttatctgtttcttcatatttaaagtagggttttatagaaaaatataattgaatcattctttttatcaaatatgacaatcttttctttttaattggagggtataacctaatcaaagattatgtaatctccctaggaataatctacatccaatgacttgtaagtgcaagagtataaagactgggcccctttgactcaatttaagacaactctgaagggacatgtcagccacaaggatccccatgggataggatgaagtctccatcatgactgggccacaggtgaatgctttctctgccacttcttcctccctacttccttcacttcctcacagatgttgttcctgaaagtactttccaataataagttccttcatacagacctcttaatctgaccaaacacaggcagttttaaaatggttaagcacacactagccctttcccagaaattctacttctaagtatttttctcaaaataaatgaagccataggtctacagaaatatttgtataagatgctcataggagggtaataacagccaaacatgaaaacaacccaaatgtctgttaacaggttaacaggtagatggtttaaaaaattgtgatatatccatacaatggaatccagcaataagaatgaataaaatactgattcatgcaacacaatgaatgaatctcaaaaacattatgttgagggaaagaatcctgacacaacagagtacatactatatgattttaattatatgcaaaattaatttataatgatggcaaacagaatagagggtgccttggatgaggaaagattaaatataaaatgaaatggagaactttctgaggtcatgaaaaagttctacatcttaattttggtgatggatacataagtattcacatttgtcaaaactcatataaccatgggctcaaaatctatgtcagtaactattgaaaattaaacctgaataaaaagtttaaaactcaagtgacactaaacaatattgttaataaatgtattgcaaggtagtacaacaaaaggaaaaaataagatgattattacaaaattctccctttaccgtggagaaacttgaccacaatttacataggtgagcttctgcattgctgataatgttctatatctagacttgtgtagtgaatatatgagtgctgatttcataatcactgctaaactgtatgtatttgcaggttttttgtatatttcacacttagaaaaatatttaaatgaatatatttaactaaggattagtacacaaaaaatatgtaagaaactcatataactaacaagaagatgacaaataacctgctagaaaaaaaatgggaaaaataaataaacaggagtttaacagaaaaagaagcacaaatgtatcatagacatttttattttatttatcttttgtatagggatggggtctcgctgtgttgcccagatggggcctcaaattcctggcctcaagcagtcctcctgtctcagcctcccaaagtgctgggactacaggcataaactaccacacccagccagtaagtaataggcacttttaaacagctatattgagatataatttacatctcatatacgccatccatttaaactgtatgactcaatggttttagtcatgcatttaattaccttttctttttagttgtccatcactgctcattcttactctcttcctctctctctctctctctctctctcacacacacacacacacacacacacacacacaccccagaatgtagaatccttgagggcagggactttatcttcttcacttgctgtgtcctaatatctagaatggtgcctcagaattgtaggtccttaataaatgtttgttagttgactggaatgaaggcagtggagatggagaaaactgaatcgacgtgaggaataggtaggacccggcaatggataggatgtggggactgatggagagggatgtgtcatgatgacttccagatttccggtttgggccattcagcagttgttgatgtcaataacagagccatagaacactggaggcagaacagattgggagatacaaatgactggaagtagaatgacatcttgtagtgaaaagaacatgtatatagaaagtagaaaaactgagtcatagtcctgaatttcctgtgtaactctgatcaggcaactgcccacttctggacctgtttttcttttgtgagttgattggtttggactgaaaaaacattctgggtttttgcatccagatcttggtaaataatttaggacatgtagaatctgtccacagaggtatgtttcactgagtccatacccctcaattggcttatagctattatcacaaatctgtctgtggcatcaaacctttgcccagagatctctgaaatttctagagagtgatgcacctgggctgacaaacaagtcgctcatctacacttagcctgaaacacaaagtatcctttgtcgtttctgctcccactgttcatttctaggtccagggaagtcagctgagggcagttcctcaccactgccactgccagcagttccctgcacagcaatgatgatgagttcaccaaagacgttttactgtggaagctcctaaaactactggcccaatcagaaaccagaccttaagatgccaaaggattgctcgggggccttatgttatagcatgatgagatagtgactataaaatgaacgtgctaaacatatttgaagacataaaacacagaatttttaaaacacaataaaataggccgggcacggtggctcatgcctgtaatcccagcactttgggaggtcgatgtgggcggatcacctgaggtcgggagtttgagaccagtctgaccaacatggagaaacgccatctctactaaaaatacaaaaattagctgggcatcatggcacatgcctgtaatcccagctacttgggaggctgaggcaggagaatcgcctgaacctgggaggcggaggttgcagtgagccaagatcacgctattgcactccagcctgggcaacaagagtaaaactccgtctaaaaaataaataaataaataaataaataaataaataaataaataaaataagagaaccttctagggactccccactttccttggaataaagtccagacccctttccatggcccatggggtcctgcatggtggggacattggcctcctgtccagcctgggctcctgccactctccctgcttagctaaaatctgaagcccaaggttccttcaccccctcaagcaaaactcctttttgctgtgctggggtccctgtggatactgcctttctgcccttgagcttctgtggcctgtgaggctcaccctgtccagaggctcaagcttaccaagctcccatgccctgtgatgattctattgcgagattgtggggcaattccctatctggctttgcttccccacgtggttggctaagaagccactatgtctgcgtgggtctcaggccagcctgtaggacatgaggagctggaaagcagaaggctggcagggctgagagctgagagctgttggcagatcccccagggcctgcagtgcagcgtcttgtagcaggcatctttctccaatagcccagaaggcagtgtgggagtaggggtcatttgtcccaaatactagctcactggtcctcaggttgcagaaccaagcagggaggctattggttccctgctaggccactgctaggattcatgggcagcttctttcctgacaaggcattttcaaggctgctgctcctttcctcacctctttttacttttaattgtggtaaaatacacatcatataaaatgtaccatcttcatgatttttaagtgtacagttcagtggtacattaagcacattcacagtgttgtgcaaccatcaccaccatccatccacagacttgtcaaactaaacctctgtccccattaaacactaactccccattctccctccccctacccccggcactgaccattctactgtctgtcactatggatttgaccattctagggaccttgtatcagtggaatcctacactaattgtccttttgtgagtggcttacttcactgagcgtaatgctctctagggtcatccatgcgtagcatgtgtcagaatgtcgttcctttttaagactgaataatagtccattgtatggatggaccacatttggcttatctattcatccattgatggaaatttgtcttgatccaccagctggatattatgaataatgctgctgtgaacatgagtacacaaatatctcttcgatctgctttcagttcttttggatacatacccagaaacgagattgctagatcatatggtaattctgtgttgaatatttcaaggaacatccattctatcttccaccattttacattcccacatatggtgtataagggtgcacaagggttccaatttctccacatcctcaccaacatttgttttctgtttttgtgatactagccatcccactgagtgtgaggtggtatctcacaatagttttgatttgcatttccctaactggtgatgttgaacatcttttcatatacttattggtcatttgtatatcttctttgaagtatcatctattcaagccttttgcccatttttaaatctcgcttgtttcttgttgttgtttggttgtaaaagttctttatatattcttgatagtaaccccttatcagatgtgtgaattgcaaatattttctcccattccattgattgccttttaatattgttgattgttcctttgatgtgcagaagtttttaattttgatgtaggccagcgtggtgggtcatgcctataatcccagcactttgggaggccaagcaagggaatcacttcagcccaggagttcaagaccagcctggacaacgtagggagaccctgtttttatttttaaaagaatttttaaaaagttttagccaggagtgttggcgcgtgccagtagtcccaactacccaggaggctgaggcaagagtaccacttgagcctaggagttcgaggctgcagtaagccatgattgcaccactgcactccagcctacacaacagagtgagatcccgtttccaaaaaaaaaaaaaaaaaaaaaaaaaaaaaaaagaagtagtctcatttgtctatttgttcttttgttgcctgtatttttgtcattgtatccaagaaagcattgccacatccaatgtcatgaagcttctcccctctgttttcttcagtttacagttttggcacttgtgtttaggtctttcatccatttgagttaattttagtatatgatgtaaagtgagggtccaatttcattattttgcatgtggataacaagttgtcccaacatcatttgttgagattctcctcagctcttaaaggaagagaggacaaggagcatggtgactgagggtgacaagacctccctttctcttgctgagccactcacttgatcaaggaccctgagcatgaatttatttattcattcacgcattgggcaatatccaaacccagagttcacaacctccataaaatttagggagtccatgcaattagatcgtgaaagaatactttttttttaaatttttactaacctctagttgaaattaccatcatggataacgaatgcaggcaatcaaccacaggaagattagcagtacttataacagtcaccgagtgaaatccctgatattttcatattacattaactgtggcagcagctcttcaaatatgctttatacttgtcactacttccaaattacaacagttattagacctttcctcaattctattatttaacacattaatgaagatgcacatacattttatggcatcacaattgtggcttagaaaaatattttgataactgtctttcaataaaatagctttctttgtattcctatcaattttatttcatgccttcaaaaacattattctgagaaggaacacacagatttccccagacaaccaaggagaaggttccctgtgctgggcactgaggacacagcagcccatgataaagaccttggtcactggctttggaaagatcccagccactgagagtgggagggcacacagatatatagatacaacacagtctggggatttctgtcccacaggcagcaggtactgtgggaccccaacggactatacagttccaaattgactagccacttcttggaggtttttgtgtgaggaaggactgtctactcatcagcctggaggagtggtcctgtccctggtgacctgtttacccctctttgtgcaggtaatgagattcagagaaaccagctctgccccccctggcagcagcagatcacctcccttcccccgtcttctgctggcaccagatatattcagctgtgggagcagagatgcttggtgtgttctcggtagctatggaaatcccagggtttccctagcaacagctccagatgggtcttgttgctagggaacgctgggatttcccaggctgccagatgagcaagacagctctagccccagggcagaggtgctggcagagatgtgggtctgacccctaggggatggatggtcccctttgactctgatcctttggggcacccagccccatagccaagcgaaaggatgctgtgcattgaatgaggagatcttgagagggggatgaagagggagtgctctgggtaagcaaactgattagaaaagtccaaatgagcccaacggatgccaggaagaggaagacagtagactttgggaagcttgcaaccttcaagtccagcacttggctgtttctaaagcacttttcccaagattatcgcacagtatacacctgctcggtttcaagagaaggtccaagattagaacgaaggccagtctcaggagtgtgcagcctaagcagtcacacagcgtcccacacttagaagggctctgcacgcttgaattaatgctctactgccactgacttgaaatgcttaataatttttaaacaaggggccctgaatttttattttgcactaggccccacaagttttatagccagtcctagctaaaacctttattttataagagagaaagctgacccgtagggagcagatgtacttagtctaagttcacgtgactgaaagtgcacctcaggggctaatgcatttgcacttagctgctttcaggcaccagcaactagactgaaacaggccttcagtgtgggaaggcattcctggggttcccgtggcagaaaggtaggggtagctggaatcacagctccctcacttgttctaaggatccaactcagaactggagaaatccaggctttagggagctctcaggctcgtagggaagcagacagcattaagaaaatacaattggaataggagctgaggaggtgacagcaggacaacacctgttaggggctatctggtgtcccccaaaattcatatattgaattcctaagccctagtacctcagaatgtgactgtttagacatggggcctttaaataggtaattaagatagaatgaggccgttagggtggtccctgatccaatatgactggtgtccatgttaaaaaaggagattcagacacagacttgtgcagagggagaaccatgtgcggacgcagggagaagtgggccatctacaagccaaggacagaggcctcagaatgaaccaaccctgcccacaccttggtctccaacttccagcctccagatctgggagacgatgcatttttatggtttaagcctcccagtctgtgatgctttgtcatggtagctggagcagactagtataacatccttcattcctcccactcctgtgaaataaagcctatgactctttcacagagaaagggcccaagactttaaggggttaactatcttgctcagggtcaaaccagtaggcagccatgccaggacttgaacgcagcttgatctgtccctaagcctgtgttttccactccaccagcctagggggaattgcaccccaattcgcccaattcagaaggtctgaatccctttcctaggcatgcccatccctctgctgccctgtgggctcagggacttcctggcacagatctcccaaccccagactcaaagcttccctgtggtttgcattcctgccctagactaagaggactgccgtggctggatcctttgacagaaggactctggagccatatcaacatttaccctaaccctaaggaccaaacaaaagagtgaatatgacaagcctttataagtgtcacacaccagagttccaggtgcatggggttcatgaacaccagcactaagggaacattcttcctttactattaaagtagctacatcaggaaatcacagattctgttgcctttatgtggaggagcaattcagctctctctgtgactccctcatttcaacccagaggcagccaggtatcttcctaaacaaagagctatctacccagggacaaccatgttactcgcctgaaaagcaaaagcaactgcagatagttaaggagatttttcttctttcttcttttgttaaaacaattttaggttaatggtgctttattggggtataacatacatacaataaattacccagatattgtgtccaacttagtgaaaaatttaacaaatgtacactcccatggaaccatcattcttgttgatatggcagttgtatttttaaatagaaatcccaccttctttagccaggcgtggtgacatgtgacagtagtttgagctactcaggaggctgaggtgggaggattgcttgagcccaggagtttgaggctgcagtgagctaaggtcacgccactgcactccaggctgggtgacagagcaagactcccatctttatttacaaaaagagaaagaaaatcccatctctctgctgcgaggcttccgtgccatgatgaagagaacaagggctggggaagcacagagaagagtacaaatccagcatggaggaatcctgaaagcatcccctcgagcgtgtgacagacaggtaagctagatcttgtaaagagtctgctgagaggagacagggaataaagggacattgtagacataaggataagcaaaggcttaggggtttccaacagcttaggagaaagagttcagagtaaatacagcagaagatggctcatggggtgccatctggggtcaggaacagatatgattatataaaaatgaaaccaagcttgctgtctgatttagaagctatttctgctaccagaacagtcagtgcctgtctaacgttcatgtcaggttttattgcttgtggtcaaaggctgtcgcacagtacacggagcaaagagcagaaactgcatgatttttcagaacaacgtccagaataaatatgaatctctgccttaaatgggacattgcagagcaagttacataaagaattatcagtctaatagatcacagcactagttgatcaaaatacttaacatcagcttagcacggacgtttaaagcagtcagcatcaaagagatacttaaagttgtaaaacctaaatgcatgtttcccctcattgtccccacgtcattttctccctctttaaacgcttgtcttactctattgcatagaattcatctttttaagctgttttaaatcctttctggaaaaatgaaagtatacaatatacacagattaccacatacataggtgcatgcctgtctgtctcagaaacggcctatcatttcacatcaatttttaataccacccctaccataaaccagattgccatatgcacataagcctgtttcaagactatttcttctgttccaatagtccatttattcgttcctggtagtataccacactcttacttactgtattttctttcatctaaacaatcaaacattctcaagtctttcccattaaaaaaagaaaattctcccactgccacccccacatggccactagctaccatgctaactctctttccacccttttacggtcacatttctcaaaacgtctgcatgtggccctctgtttcctcagccacttttcaatcctaagccacggcaatcttatttctactcccaccacaccacacaaactgctcttgctaaggtcaatgagcttatgttgctaaatccagagggcaaactccagccttcactagcttcacccaggtgaccacttcctctccctttgcttctgtgcccttccatcctcttgggtttcctgcagttgctttccttattttccatcccccttcttggcctctcctcctcttcccacttcttaaacacggaagctcctaggatttcggggctgggttacattctcttaacaggctcaccacagtttacctaggagcactccccctcatctatggcttccaacattacctgcaacatggaccatgctgcatgttcaccaaacacggtttccttttcctgctttacatgcagttagaccacatttcctggaatcccttttgattatgtgccactagcttctgaccaatgggatgtgggaagaagagatgtttaacacttgcaggtctggccactcaaacctcacacgtgatcttccatgttctctcttttcattcatctgccagcccggtgccaaaaaaaaaaaaaaatgccagtggagatctctgagtgcctaggggcccctggaactactggacaagaggaagctggatgtctaataccctgaataaaacagagcccggcctccaccccaacccacccccactgactttgaacatgagtgaaaaataatcctttattgagtcagctcactgaaatacagaaattgtttgatgaagcaattaacctggcccaactaatacactatctctatgctaatgacaaccaaatatttgcattatgggcctgttcttctaattatgcatcaaatgattgacaatgcagcccaaactgatgggacagatagtttttttttaatagattactaggaagtcacagatattcatgcatacattcattcattcaataaatgtttatcgagtgcctacaggcaccagataccgtgctagaaactaaggttgcaatgatgagcaaagataaaaccagtccattcactcacaaagtttactgtgagcctgatgacagctgattctcatgtctcattatattccagctgcgagaaacttctgtagcatttgctgcttcatgcaagcccgctacccataaaactgaggcttcccctctctagatcctggaatccactgttctctcctctatgaaagggtgcaactggatataatagtataacacccctttctcttaagtattttgtcagttttttattgtagtaaaatatatataacacaatctttttcaatgtaacaatttgttgctaattcagtggcattaaatatatttacaatgttgtgtaacttttaccactatctataccccaaaattgtcactatcaacaaaaactccatgcccattcaacagtaactcctctttccccttcacctgagcctccagtgacctctattctactttctgtctctaaaattggcctattctaggtacctcatataagtggaatcatataatatttgtcctctgtgtctggtttttatcaggaagcgtagtttttaatagtacatccacgttatagcatgtatgagagtttcatcccttttcgtggctcaataatattccattgtatggctagaccatatcttgtttatccactcatctgttgggatgcacttgggtttctacttttggctataatgaataatgttgctatgaacattggtgtataaatatcttttcaagtccctgttttcaattcttttgcatctatatcttgaagtgtgattgctaggtcatatcataattctatgcttaaccgtctgaggaactgccacactgtttcccaaggtggctgcaccattttacattcccatcagcaataaatccaggttccagttattccacatacttgccaacacttgttattttccttatttttttattatagccgtcctagcgtgtcctagcatgtgtgaagctgtatctaagaacagttttaagtataaatgttatatatgaatacaattttgttctgacaaattcaaacccagaatagaatttaaaaatccacttcactgtagccacgtccaacctccttcccctctccagagaaaatcactgttaaaaatttggtatgcatctttcctgatcttgttctctgcatttgtgttctttttttttcatatatggatttttttttatggcagaatttttatatatttataaatcagttgggaaaaggtaaactattcaataagtgatgctggaacaaatgagtctccatatgggttcagaaggaaaattttgccacccaccaaaaaattaagatgaaatagacacgaaacatggaaaacaaaactataaaacttacagaagaaaacacaggaaaatatcttcattatacgtgggcaaacacagatttctttttttttaaattttatttttccataagttattggggtgcaggtggtatttggttacatgagtaagttctttagtggagatttgtgagaacctggtggacccatcacccaagcagtatacgctgcaccatatttgttgtcttttatcccttgacccccctcccactcatccccccaagtccccaaagtccattgtatcattctgctttttgttttgtgttgttttgcatttgtattcttatgtgtgcgtgaatgcaagattatgcgtaatggaaacatagccattctgtcactgtcagttttcttccttctttccaactgttccactgttgttgttgtttttttctgttagagaagttccacttcgaaaattttgccctttagcttgtactgctggttataacgtggtctttgatttccaggaagagtatgctgtgttggctgaagtcactagcagaagaactttggtgtctgcctcatgtagaatgcattgcctaggtcgtctcaggcctgatctgagctgaacttctcctatcacatatgccaacaactctttatgcttctctctttctctgaaattaccttcttttgtctggaaaaaaaaggaatgaggaagatttttcaccccttcagagaaaacaactatccaacaggacgaacgtgggaaacagccagtgtttggtgagagatcgccctctgctgcctgtgttaatcagggttctccagagcagcagccaataggaaagatagatacatttgtaaggagtaacataatacatataaatatacatatttaaacatatatatttagattataaatataaatctatgtctatattatatataaatatatacaagttggttataaggaactgactaacactgttatggaggctggcaagtttccagatctgcagggtgagttggcaagctggagatccaggagagctgataatgtagttccagtcagagttcgaaggcctgagacccaggagagctgatgacatagttccagtccaaagcccagcaggctcaagactcaagagaagccgatgctgcagtttgagtccaaaggcaggaaaaagccaatgtcccagtttgaaggccttcaagcaggagggattctctcttacttgggggagagttggccttttttttctattcaggcctttaactacctggatgaggcccacccacataatgggtggcaatctttacccagtctcctaactcaaatgctaatctcatccagaaacaccctcacagacacaccgggaatgacgtctgaccaaatgtctgggcactccgtggcccagtccagttgacacataaaattaaccatcacactagccatatgggccttttagggagcctgaacccatagcaggaagctctggtgccttgagcaattgtccggatgggcattataggcagttaaaattctaagcaagaaagattaagaaaaaaacaaaagcgtgtaggccaaactggagagaaagagagtgcagtggcaatgctattcgggtttctttcctgctcagaaccccgtgatgactcctcatcccccatagaacatacccttaccttatggggtttgtgaggcctgactcactgcctgcctcctgctgccaccacacatgcttcttcactgttcctcacttgtgccaagcctgttgctgtttcagggcctttgcacttgctgttccatctgcctgggcactctttcccagatccttacagggcttcatggcaaggccttccctgaccaccctccccaaaatagcaccccctccatccatttccgcctccttacccccctttatttgtttgagcttgtttcctgtcttcttcactaaaatgtaaattccacgaggccagggactttattttttttctctgcaaggcctggatcggaataggtgctaagtatttgctgagtgagtggataaatgaataaatgaataaatgcaaaagatagaaggaggggacagatctagtgatggataaaaagcacatacgaaatggtgtggatcctaacgaataattaatctggggaaagctaaagctgaaaatgaattgaggctttaagaaaatgctgaagacagataagtaaaatgccttttagtcagtgtaaggaagtgtgagagcaatttcttggaagaaaataaatcctcttttgttggcatttttccttccagaagattgatcttcaagctaaagaaaagttggaggagagggaggagagagagcgggaaatccagacagctggtgaagttgctagatcccagaggctccaaggagcgattgattgcaggggatgtctagatagtgacagagaaagcgtcatagagatccccaggccccagagcagcaaggaagcagcagcctcatgccctcaggcatggcataaaaataatgctagagctgcctcactgaaaaaaatcccgaagggccaggaagcaggctgaactcagccaatgtctgtatggacagaggatctctaaaccagcccccacccccccacacacacacacacacacacacacacacacacacacacacacacacacacacacacacagagctatggcacaatgctatgggtttgcatatttttctccatgccccccagaatgatgtccaaatctagagcagtgggtgtgaatcttggctcgtgaactctttgaacaaatctgatgaaaattgccacatgtgcattatttcagggaatttaaggaaatttcaggaattctcctccaggcgattcatggacacctgaaatccaagtgccccaggttagaaactcctgttctaagggtatattcctcaattgcagcacttggattaatgatgtaactccttaaccctagagttgaagattgcagccaaattcttagtgtattcattcaacaaatatgtattgattgactgtcatgtagcttatttaatcctcacaactgcccttgaagtagattatattaataccaccctcactcttgacagatgaaacaaacgaggtactggggctttgggtaacttgctacaggtcactcattttgcactagtcactagtaggagcagagccagtggtggaaccccagaaattcagctttagagacattttactgctaccccacgatgcctcttacgaggttggcatctgtctttcagatagccccgttcaccctgaaaacatgtctcttagactacatatagtaggttagacatgaaaatcccaccaccaacgacatccggaggctctgtcaccctgcctctgcttattcatcgttcccatggtttgctgactcagttttaatcattggtttaccttctggatctatttgtatgagggattgcacaaatatttccccacatccaacatctcgcaaggagatggactcacgtgcatgttcaagttcagtctccaagttgagaagaaagctttctggtagcaatgctgcacacacccaggggctcatggatctctcaggagaggccacatccagtgtccatgaagtcatgagttctgcagcatagattccaagttcagcttttgtttcatcaacattactgtgtgcacttctggttgagacacttaggggaacagagaaagttcttcagtaaaagagaggatgtatgagcttcctgtggcttctgtaacaaagtacccatggactgaggagttaaacaacacaactacatggtcttgcagttctggaggctggaagtcaaagatcaagatgtcagcagggtgagctccttctgagggctgtgaagaaaggatgtgttccaggcctctctccttggcatgaagatgactgtctttgccctgtgtcccttcacatcatcttccctctacacgtgtctgtgtctctgtccaaatttctccttttataaggaaataaatactgtaaatatatatatattttgcactataatactggaaatatttatatattcctagtgtttatttatatatgtatattcccagtattcatatatgtatatatttccagtatttatttatatatttatttgatataaggaaatactggttgtattggattaaggcctactgttgtaaactcactctaacttgattacctccacaaataccctacccccaaataagttcaccttctgacgtcctagcagttaagacaccaacatatgaattttagaggtcacaattcaactcataacaagggataatggtcaggaagaaaaagagccacagaatgctagacatttttaatgagttaataaatccttgctataggatcaacaaacttagtaagttaataaacctgatgatggatggatggagcattgtaccaggcacaaagcccggctatgatgacatcaaaggcaccctgctctcttctgttgagaagtgttcaaagtagttagggagtctcaatgagcccatgtagcaggtaagcaatcttgatcgctcacactcaaaaatgcaaatgtatcattttgttcacttatagctagacttaatagggtatccattcaaatgacctgtcattccatcagtgcccacacctggtgactttttccaaggggtccacagccccaccaggattctccccactgtggcattatctccatcacaccccaaggctagatgagaccacagccctccaaggctaaatgagaccacagccctcttggggcactaggaagatccagcttaaaccactgctgaattcaaggtaatttagtggcactgcctcagaacctctctgtcctggcaccccacctagtggcaagggacatatctgcaagactgctgtcttccagaattccagctgggacgcagtcctctatttgaaaacaagttttctggaaggagggagctctgaggaggagtttcacaaggagaagaacacagatttgggataagatggggggacaatatttcagtagggacaatgacagagacatgagtacatatatatatagcaactaactttatatgaagggaaacacacatagacatgtattaaggacacggtgtccaagtcagagggaaaaagaaaaacaggctaattaatgagcagccatcatctgtggcaaagaggcatcaggctctacgctagcctttgtttgctgtctttgacctctctgcacctttgttttctagatgagcaaactgaggcttgagggggttgaatcctttcccccaaaaccacagctgctgggttgaagagttgggattttaaccaggggcggctgaatcaaaaggctaggtctcttccctgagcaaaataatggcatgacaaagacagtactgcagattgtcttgggaaaagacaggacagggaaatcagctaggaggacatttcagcaatctgaatttgagttgaggtggtggcttcagaaatgaaaaagaaaggggtggatgagtgtgaatactgtagggaaagtctgggtgacatataaggcaaagacaaaaaagaaaatgaaaatgacatcaatcctctaaaccactgcatcagaaagataaaggcaaacggtggtggttaaggagaggcttggaagaccagatgactgggaggctgcagggaaaagctagaaatgagggtaactttagctccagatacagcaagtgctgatggcgatgttctttgaaatgggtccacaaacccacataagaatttggagggctactgacagagatttgggtcagcaaatgggtccgatatgtccgagcatggcacacaaggatgatgtctcagcttcacagctgcagctgatgcagaggcactatttttgctacaactgaagatgtggccattccagcggcttccagcatgtaggacgatgaactaagcaggtcatgagacatggagtggagaaaggagcaacctgctgtaagatacttctcactaatggtgatggaggagctagctcaaaaaggggtagcttctgcactgtgcaggaacttgacaccatctggacagcaagccggtccagtccaactgaagggtgactaagtgtatagtgggctgcctactggcctagagtagtgactaagttgcaattctcgttaaactgttgttttgagtgtattacttccttctagcatattgtcaaaattctagtattcaaaggtgtgacaaaaacataaaataaagttgagcagccctggaatacagttatccttgacagcaggagtccctcaagggaagagctgctctaagatcaagttttgaggttggcccaatgacagtcagacatcctggcacttgaggttgcatttgaaaggtcagcattctcaaaagccagattgaactttaaggaaatttcccccagtggatggtagggagccacgtggtccctgagacacctgggtctaacctcacagtctaactcctaggcttcctaaagaggtggttaaacaagaaaagtggtaaaaaatgtgttctttcttctcttcccggtcatcatagaacttaaaaaaatctcagtcccagcagctgttccatgtcttacagagacagaaactgaaccacctcctttcttaaatcatttcgttatatcaggcttgagcatgtctaccaacaaattctgctgttcacagtagttctaacacttggaagcaaagaaaagacgaatctgctggacaggtttttcaaggaaatttagcacaaccctaagttattaaggaggcccacaagaccaaacacaaactgactattctccctctccgtccccctacccttcctcccctccggctctctggtccatcctcagggaactggcctgcattccctagccctctccaccatcccgccagatctctctagtccaaccccatatcaactgacctctgctctctctccatccccatccccttatcccccccatccccctctacctctctggtccagccccacatgaactaactctgggctcaatctccttcccagtacccagtccattgtgagatgacctctcttgctccctatgtctctaagcctttgcacctgtttgctccatctttgcatgaactaatctctgctccctctacttttccatccccctcaactcctctggcatccctctggtccagccccacatgaaggaacccctgctccctcttcctcccctttttctccaactctgattgaactttttagttcaacctcacatgaagcaatctctgacctctctagttcaaaattccacccccaccctcctgcagctctccagtccaaccccgcatgaactgctctctgctctctcctgtgccctgtctccccccattgcactactgccctctgccgcagctgcacatgaatgaatctttgccctctctccagcccaatccctacacgcaaccgacatttctttggtccagccccacatgaactgccctctgctttctctcctgccccttccccaccacctccctacattggtccgtcccacgctgcatgaactgacctcagtccctttacttctgatcttctcccactccccagtgtccttctggtccagtcccacatgaactgacctctgttacctctccattccaaacccaccccactcctccatctctctggtccacccgcaagggctgacccctgctacctctgtctccctgcctgtcccctgcagctctgaaatgaccggtatttgaacccactcaccctgcctctccctccctaacaacaaaatgggaggcagggcccagtcttttcactcctctccaatagtatatgtctttatgcaatcatatgccaccttcacaccccttagaacttacccagtcactctccctacatctctctggtccagccctccatgacatgaactcagctccatctcctttccttccccttccccaccatacatctctggtccagccacacgtgaactaagctccgttccctctcctttcccttgccccacactccggctacctctgcagatacagccacacataagctgtcctcagtggcttttcctttccctctctgacgctctgcatctctccagtgcagctgcacaggagctggcctcgaatgcctctcccatgccatcccattcagccttctgcatctcttggtacagcctacatgaactgacatctgctccctctaagtgtgcatcgccacttcatccccctccagcttcctgggccagccccacatgaactgtcatttcccctcactccctcacaactctattgtccacatgaataagccactaactctacaaacccacccactgacactcccatgaaaactcagctgcatcctcacatgaactgatccctgctccctctcactcccttccccctacccctgctcccctgcacctctccgggacaccccatgcacggatcttttctacttctctgtccctatcctctgcaatttcccttcatctcttggtccagccccacgtgaactgacctcagttacttctccatccacatcctcccccgccttcaggactcttttctgcctccacatgaactgagcccagctccctctccttccccatcttcctgatccctttacagctctctggtccagccccactgactcatgctccctctccgtccccatcttcctgatccctttacagctctccggtccagccccactgactcatgctccctctctgtccccatccttccactgaataactgcacacctatgttagaatggctgccaggcaaagaccttatgtttgcttttatcctcagggataacctattacttgccactctccgtcctgtctcaagagattcctgagagatttcatttatgggaatattaagcaggaggagataagaatgtctccaggatagtccattagcttaatttagccattcaacaatgtatacatctttcaaaacatcatattgtacaccataaatatatacaatgttgtcaatttcaaaacttctttttaattaacttttttttccttatccctgaaactgtttttttttttttaagttaagttccgggatacatgtgcaggacgtgctggttgcataggtaaacgtgtgccacggtggtttgctgcacctatcaacccatcacctaggtgttaagccccacatgcattagctatttatcctgatgttctccctccccccacacccccacccccactgccaccgacaggcccctatgtatattgtccccttccctgtaactacgtgttctctctgttcagctcccactcacgagtgagaacaagtggtgtttggtttcctgttcctgggttagtttgctgaggataatggcttccagctccatccatgtccctgcaaaggacatgatctcgtttaattaactttttttcaaaagagtgtttccagggttacagttaacagtaaaattggaggcagggcccagtcttttcactcctttccaatattatgtcttttatccaatcatatgcctcttattagaaaatcacaatacaacaaaggtcaaatcctcctaggaaatgctatcaacacactttggggacagtaatgataaaagcttcatggacccacatttaacaacaaagcttatgtgataactgtagcaaaagaatgggagtaagactgaacacttctgaatcctcttgttcttgaataccttcaagccaggtcctctctgtaagtttgtatttcacctccagtgattctgagtaggcacaactcttctccccatcacacagacatcaaactccaggcacctagagaagtagcttgccccaaattgcccgatgaggaagtgggtgtgtgtgagaatccagggtttgggctagtctgggctcttcccccaagtttttcttaaggagcagtccctcggcatgagactcatctgggggatatggtaaacttcatattcctgggcccccaagtcctacaggatgtcagggtccagaggcatgagaccgagggccaggcttctggcctctgtaacgtgctccccgggtagggttaccagtggcaatacaggatgcttaggtaaatttgcatttaagatcaacaatgaataaacaaaaaatacaaatgggatatagtcatactaaaaaaaaggcatcattgatctgaaatgcaaatttacctcaactttctttttattagctgaatcaggcaaccctatccccagaggactagcctacccccagaagtttgaaaatctgttttctccctctccatgtgaacaaacgagcattccatcattgttcattttctattctccctcaccccttctgcctccccactctcaccctggagcagagactttaatgtcatctaccaggatttctcacacagggaatcccgggcaaggccaggaagatggttggatggggtcactcagcccaacccacctccaagagtcgatgagataccataagcaaataaattcacgagaggttggctgaatccatcctagtgttgcgttagcctggctctccccattttattcaagcacaaattactaacaagactcttttccagtcttagctttgccaaaactatttttagagcatcatttaggcttaggtgatataaaaattctgctagttttacaaaccagcagccttccaaggcaaaaagcaattcatgccaggaaagtagcaaaggattattcattttctgtccataggctggtaaggagttttgtatctaataggctgccttcaacacaataattgagaagaggaactcataagcaaagctaaagaactcatccttagagaatacaagttcaaactgagaaaggttttacttttaagacaaaacaaatagcattaacacacatccaaatgccagtgcaggagttcactgggtttataaaagagaaaactaaactcaagtgtcaaataaaaactggagccgtcaagaatgactgcttgtggcaacacaggtgtaacatgtgcttgtctaaagtcgttctgtgtttgtggatatgtggaaatgcatgacgagggaaacgatgcaaggcaaaatggcaggtgctcaaagctttaagatccttttcttcacgcttgtgtgctcttgttttgcttttgagaattagggtaattcgcaggtcattttacaaagaactgtaatatcaaagaacacttccaaacggctaaaataggctcaaggtcactattaaagtgataaagggaggtccgtgggggaaaagtttgtgttctcaaaagccagatttcacaccatggcaggcactaaatctagttacatgtgcttgcagtagaaaaagaagacactgatcttaatagaggctggtctttttcatgatgcgcaggaactcttgctcactgacctctccatctccatctcgatcagcttcatcaatcatttcctatatgacagtaaagattcaggttaatttataaactaatgccaaaaggtgactaagtaatagacttttttttttttagagatggggtctctatgctgcccacactggtctcaaattcctggccacaagagatcctcctgcctcagcctcccaaagtactgggattatatgcatgatccactgtgcctggcaagcaatagacttttaatctatgtgaatagataatttgtatctatgtgaatagatcattgtagtccacccaatgccagtatgctactcctgataatagcttggtttctgaaaagttatttgaaaaccaactcatactttgtcaaacatatcacctgggagggaccttgaagattgccttgactagagggattcctggaacctaaaatagtaagcaaaattgtgcatatgtgcatttttctggaagcagggttcataggtttgtctgactattaaaggagaattaagttgtctgcagagggacaaagtacactggcttttcttcaaagaggtgctcacactagggaaaatgtaatggaaaagtcacagagggctcaaaggtgggaattttaagttccagtgtgatgcattacaaacctgcagctcctcatcagtcaggttctcacccaactccttggccacgcgtttcagatttttgaacgaaatcttcccagtttcatcatcatcaaagagcttgaaagctttcaggatttcttctttagtatctttctcagacttaacaagtagaacataaaacacatgagtagggggacaccacggttggttactactgtcctgtagccctgccactgcctggtcaggtcaccctttcctttttaacaatgtaactcgagtctagacttgcggcaagtgtcaggaagcccattttggcctcaaagaaacaccaggcaagccaggcactccatccaaggtgacgtttgctacctatcgctatatctctccctatcccatatctatttcctaactgatttggaattctgtgggaagaggtatctgcttggaagtcttgagaaagaagcacaagggcttgttttgggagcccaaagtaacatgatgggagggcaggcctcctgatgcagttgctacctggactgctctgtggtcacatgactgttttaacaggaagacgccatggacctctgcagatgactggggctccataccatgataattgtcttagctacttaccattttctgggtcatcacagttaaaaagtcaccaaagttcatttttcctgtcccttccttatcaatttcacttatcattttcttaatttcttctttcttgggttcaaagcccagggccctcattgccacctataaagaaaacaggatcgtctcaataagcacatctaaagtagcaggagcaaaaataacagtgttgagagcattaagccagcatctgatgtggtcatgttaatatgattggggaacactatgacattgatctaattgatatttgcaatcaattttattgaataatactcaaagtaagtaaagacaggaaaacagcacagtacaacctcccctgttacttactgcagggagaagagggcaaaaggggtagagaggtgatagggagatgacaaggaagaggcagaggaaaggaagggcagtacggcaggaatgcacagagcttgccttcagttctttaacatctatggtgccagttccatccgcatcgaaaagatcaaaagcttcccggatctcctgcttttgctcttcagtaagctcaggcttagggctcattctttttcgctgagaacttgatgccatgtttgccttcttaaagttggaggcctttatatgttatgcaatacacaagcacaataatatatcatacagtccatatttacataacatagttacagacacccatatgtatttttaaagtcatttatataaccaattccaaagctttgcttaaaaagaaagataacagggtttactggcaagaacaatgaatctttccatgaacttctacccctcccttttctttactgttgtttctagaagcagggagatcacttgttcagtaaggacacctcttactgaaaatcatcccaaaagagagccagtcaagaagatgactgtgaataactagagataatcagctcttcccgaacgtggggatcctggttctgaaaacagtcttacgatgcccactcccagtactccccttcccagtaagtactccgacttcccaattacttctagatttggccaaatattagtaagttgttaagatgtatattgtgtcagtaccgagtaataaaactcaatccatctggcaccttcgtgccttctccaagaagctaaagcatcccctgaatgcccctgtatttaaattgtaaaaaacattgtaacagaacacgatacaccttttcccagctgtgtgtggaaattttggcagaatgaggaggccagggggccaaggtctgagagagtcaggggcctgtgagggattcgagtcttttttgcccagggaggttcaccgaggggatcagggaatgcaaggggagcccgaggggcgggtgtgggcctgttgtgggtgaagaggaggcagcagcgaagcgcaggcccagtaggttggttagcgtctgtaccctactctcccgggaaagagctcaaaggaaagactggtgcgctaaagccgagaaaggcgcaggagaggcggcgtggccgagctggggcctgggaagggctcagccgctgggcgtggggcgcgacagagcggcagcactcaccatagccaaaggagtccgctgccggttgttaggcaaccgacgtgtacactgactcggcgccgttcccaccgccccgcgcgcgcagccccgctccccattggccgtccgctcgtcgccgcctctccctattggtgcagggccgaagagggtgggactaacctggcaaagccccggcccagcgcggggaggggcacgctggcgacagagccccgtctttattgggcaagatcacgccgtgagcgccaattggctgagtcgtcgccgagctgggccaatcctcttggtggaggaagctcggctgattctcggctcacgcgggaggggagtaaagggtggcggtccgggcctggagttcagtgggtgcagcctgcttgcgagctgaggccagacaggggggcgcctacggacgggtaagagtcgtggccttgccattggaggtcaccctgtgtcagcgactgggcagtgcgggagggtggggagctacggggtcgcccgggtcgggtgctttctgggttgacctaaggctgagtttagggaccgagtgcatcagagcagccagaaacgattaccttgcgtgttggagcagggactgtactcacggggcaactgagacccggagaggggaaggggtgtgctgagtgttgtcgcagaggtcggacggctgggacctaggaactgaatccagccgaggctcgctctttgagggtggcccttcgagagcacccctagactgacccagatgtataggccccagaccaggttccaagagaggatcactttagatcttacctggctaaaagcagcccaggacggtgaactggggcctttgggaacggactttgaaaggagtgagggggatgtgagcgagcatgaggggcggggagaggtcatcaaaatatactctttttgacacccacacaatgcagataaggaggagcattccaggccgagacgccctcatcagcagagtcacaggagttttggaagtgagaggtatgcttggagaattaaaagggagcgtgtgcaagggctgtggactgacatagacctgcagaagtggagctggaggtccagtttgccctctttagctatccccgtggcttttagccttcacctgtttttcctccaggcataggggcagtaatctagggagacagagggcagagagtaagtttctcagacagagaaaggcccgaggcttattagaaccttttaaatggagctgctgccctttgccctcttctctcttcagcagtgaacagattcctgacttttgggtcatcatcatccccccaagtagtacgagccagagttctcactgtgatctccaaagcttggcacgacgtgtccccttccatcgctccacaactcttctctcgtctggctcactccagccccagaacactggctttgtggttgaacctcatgtgccagccacactcctgcctctcatctttgtctcagttgtcctctccgcctgcctcctcttaggcaccctatttaagtattgcagcccccagtacaaacaagccactcaccttgctctacttttttttccaacagttcttatccccttctgacctactgtatattttgcttgtttgttttgctctttgttgtccctccactagaaggcaggctgtctgagggcaggcatctttgttgtattcactactggtactccaggacctagaacagagaggggcacatattagacaactgatgagtagctcccctgtttcccagctctcacctagctagtcctccctgctctaccaggttaatcttcgtagtgaacggccctggtcagggcatctccctgctcttaaaccttcagagcctgaaccgtaaagggctccttagcctggcctgtgatccctctgcccagttttgcccctggtaacccttctagcttaatgtccctccataccttgcttcccagtccgtcaacctgcagatcggaagcctgacagagtacaagggaaaaacacaagttctgcgcaggctgtgtgcaggctgtgtgaccttgggcaagtcgcttaacctctctgagcctgtttctcatttgttgagtgagaccagtactgtctacctgatgggatacttttgcatctcaatgggatgaactacttatatgtaaagtggcctgatgttgagcaggtcttcaggcagtattacagttgacccctgaacaacatgggtttgaaccttgtgagtccatttacaggcagatttttttctcatctctcccaccgctgagcagcaggatcagctcctcctcatcttccttctcagcatactcatcaggaagaccgtgaggatggagaccatgatgatccactttcactcagtgaatagtaaatatattttctcttccttatgatttcatagtaacattttcttttctctagcttaatttattgctgggacacagtatgtaatacatgtaatgtacaaaatatttgttcatcaactgtttacattattggtaaggcttccagccaacagtaagctatattagtgaagttttaggtgagtcaaaagttatatgtggatttttgacttcggggctccgtgcccctaacccccacattgttcaagagtcaaatgtagttcttgtctctgatttgctcttgtcattcccccccgcccaccatgcctggagccttagacttgtccaaaatctcttccctgcactgcagccaaggtgatctttccagtcgcaacactcactcctgcttccaacttctaggggctccaccatctttccccccttgtaactccctagcttggcacacagcccccacatgttctcaactttgctcccgatcttgcttcacacttgctgtgacacagcttgtcactgttataagaacatgctggctctgtgccatcactttgtccttcccaccctggccatggaatgtctttcaggacaccatgcgctctgttttactcactcttctggggccttttgaagtcagcttagggatctcctagttggggcaggcttccctgagccagcagcctgcattggtgctctgggcttgccctcatcagagtggaaacgcacttctgtgactctttgcttgctcctgtctcccaccctagatggcgggctccttgaaggttggcagtgtgtctttgtcagcttctgcctggtagtggctggcatttgataacttgtgaatgaggaaatcaatgcatgaggtgacacctgggggttcttttacaagttacagctcccgctttaaccctgggggtttgtttgagcctcacagtagctctgaggtagggaagaaggacgctgttttacagataaggcctcatggccagcggcagcacgataattcactcaaacccatcttccattccaggctgtctgctgggcctccaggggctcgtggtgtcctacagggtgctgagtgtgaggatgagagcagaaacaggtgctgtggaagcgactcaccttccctggggagggggaggaagtttcacagagggggcagttcagctaggccttgaaggaagaggaggcactcaccgtggagaggagagagaaggtattccatgcagaggaacagcgtaagctaagctcacaggcatgctgctgggtttctgagaggtctaccacaaaataaaagctggcgactttttttgtcctaaaagtaaatagagaaacaaacaactggtggaaacatggacaccgcaggtccgtggaaggacaaggtcaagctgggttgccccagcataatcaaggctaaagtgacacctctaaagagaaatgacctccaagctattggcctcactaatcctaatctgggtattttctttcccatatcacatctttgaattctgaaagggaggctttattgttgttcctacagggctcctgctttgctgtattttctctaagaaatatgtccataatgaaggtgtgtgccgcctcaggtgaatccttctctttgcatctgatcatctggcccagtcctgcagaggaggccaagcatgaggcatgaggtgatgggaaataggggaatcctcttttataatccaaggcttaggcccccatttcaggattccaaagaaagttctaagaaacattacttggcattccttggatagccaaactctactgaggtgtttggggaagggcagtttgcctggcattgtctgcccatggactgaagggatgagctctcagtggccacattctagcttcctgcactggaccttgtgcaagggtggggctccgacaacctttcccctttacaaagatgtcacacttctttctagaaggacgggacgctctcatctctctccctagtttgagacagaatgttctctccttttccctccaggaaatgttccccagcaggaaggaggaggttgggctaactcgcttctctcttctcgcttcacatgaggcggcacacaccttcattatggatgtgtttcttagaaaaaatacagcaaagcaggagtcctctaggagcaaacgtaaggcctccctttcaagatgtgatatgggaaagaaaatactcagattaggattagtgaggccagtggctacaaggtcacatctctctttttttttttttaattattattatactttaagttctagggtacatgtgcacaacatgcaggtttgttacataggtatacatgtgccatcttggtttgctgcacccatcaactcgtcatttacattaggtatatctcctaatgctatccctcccccaggcccccaccccccaggccccagtgtgtgatgttccccgccctgtgtccaagtgttcttattgttcagttcctacctatgagtgagaacatgtggtgtttggttatctgtccttgtgatagtttgctgagaatgatagtttccagcttcatccatgcccctacaaaggacatgaactcatcatttttcatggctgcatagtattccatggtgtatatgtgccacattttcttaatccagtctatcagtgttggacatttgggttggttccaagcctttgctattgtgaatagtgccacaataaacatatgtgtgcatgagtctttatagtagcatgatttataatcctttgggtatatatacccagtaatgggattgctgggtcaaatggtatttctagttctagatccttgaggaatggccacactgtcttccacaatggttgaactaatttacactcccaccaacagtgtaaaagtgttcctatttctccacatcctctccagtatctgttgtttcctgactttttaaagatcgccattctaactagtgtgagatggtatctcattgtggttttgatttgcatttctctgatggccagtgatgatcagcattttttcgtgtgtctgttggctgcataaatgtcttcttatgagaagtgtctgttcatatcctttgcccactttttgatggggttgtttgtgtttttcttgtaaatttgtttaagttctttgtagattctggatattagccctttgtcagatgggtagattgcaaacattttctcccatcctgtaggttgcctgttcactatgatggtagtttcttttgatgtgcagaaactctttagtttaattacatcccatttgtttattttggcttttgttgccattgcttctggtgttttagtcatgaagtccttgcccatgcctatgtcctgaatggtattgcctaggttttcttctagggtttttatggttttaggtctaacatttaagtctttaatccatcttgaattaatttttgtataaggtgtaaggaagggatccagtttcagctttctccatatggctagccagttttcccagcaccatttattaaatagggaatcctttccccatttcttgtttttgtcaggtttgttaaagatcagatggttgtagatgtgtggtgttatttctgagcgctctgttttgttccattggtctatatctctgttttggtaccagtaccatgctgttttggttactgtagccttgtagtatagttcgaagtcaagtagtatgatgcctccagcttcgttctttttgcttaggattctcttggctatgtgggctcttttttggttccatatgaactttaaagtagttttttccaattctgtgaagaaagtcattggtagcttgatggtgatggcattgaatctataaattaccttggacagtatggccagtttcacaatattgatttttcctattcatgagcatggaatgttcttccatttgtttgtgtcctcttttatttcgttgagcaatggttcgtagttctccttgaagaggtccttcacgtcccttgtaagttggattcctaggtattttattatctttgaagcaattgtgaatgggagttcactcatgatttggctctctgtttgtctgctattggtgtttaggaatgcttgtgatttttgcacattgatttggtatcctgagactttgctgaagttgcttaaggagattttgggctgaaacgatagggttttctaaatatataatcatgtcatctgcaaacagggacaatttgacttcctcttttcctaattgaataccctttatttctttctcttgcctgattgccctggccagaacttccaacactatgttgaataggagtggtgagagaggggacccctctcttgtgccagttttcaaagggaatgcttccagtttttacccattcagtatgatattggctgtgggtttgtcataagtagctcttattattttgagatatgtcccatcaatacctaatttattgagagattttagcatgaaaggctgttgaattttgtcaaaggccttttctgcatctattgagataatcatgtggtttttgtctttggttctgtttatatgctggattacatttattgatttatgtatgttgaaccagccttgcatccctaggatgaagcccacttgatcgtggtggataagctttttgacatgctactggattcagtttgccagtattttattgaggatttttgcatcgatgttcatcagggatattggtctaaaattctctttttttgttgtgtctctgccaggctttggtatcaggatgatgctggcctcataaaatgagttagggaggattccctctttttctattgagtggaatagtttcagaaggaatagtaccagctcctctttgtacctctggtagaattcggctgtgaatccgtccggtcctggcctttttttggttggtaggctattaattattgcctcaatttcagagcctgttattggtctgttcagggattcaacttcttcctggtttagtcttgggaggatgtgtgtgtccaggaatttatccatttcttctagattttctagtttatttgcatagaagtgtttatagtattctctgatggtagtttgtatttctgtgggatcggtggtgatatctcctatatcattttttattgtgtctatttgattcttctctcttttcttctttattagtcttgctagcggtctatcaattttattgatcttttcaaaaaaccagctcctggattcactgattttttttgaagggttttttgtgtctctatctccttcagttctgctctgatcttagttatttcttaccttctgctagcttgtgaatgtgtttgctcttgtttctctagttcttttaattgtgatgttagggtgtcaattttagatctttcctgctttctcttgtgggcatttagtgctataaatttccctctacgcactgctttaaatgtgttccagagattctggtatgttgtgtctttgttctcattggtttcaaagaacatctttatttctgccttcatttcgatatttacccagtagtcattcaggagcaggtttttcagttttcatgtagttgtgcagtttttagtgagtttcttaatcctgagttctaatttgattgccctgtgtctgagagacggtttgttgtgctttctgttcttttacatttgctgaggagtgctttacttccaactatgtggtcaattttggaataagtgtgatgtggtgctgagaagaatgtatattctgttgatttggggtggagagttctgtagatgtctattaggtctgcttggtgcagagctgagttcaattcctggatatccttgttaaccttctgtcttgttgatctgtctaatgttgacagtggggtgtgaaagtctcccattattattgagtgggagtctaagtctctttgtaggtctctaaggacttgctttatgaatctgggtgctcctgtattaggtgcatatatatttaggatagttagctcttcttgttgaatggatccctttaccattatgtaatggccttctttgtctcttttgatctttgttggtttaaagtctgttttatcaaagactaggattgcaacttctgcttttttttgctttccatttgcttggtagatctctcttcatccctttattttgagcctatgtacgtcactgcacgtgagatgggtctcctgaatacagcacactgatgggtcttgactctttatccaatttgtcagtctgtgtcttttaattggggcatttagcccatttacatttaaggttaatattgttatgtgtgaatttgatcctgtcattatgatgttaggtggttattttgcccgttaattgatgcagtttcttcctagcattgacagtctttacaatttgtcatgtttttgcagtggctggtaccagttgttcctttccatgtttagtgcttccttcaggagctcttataaggcaggcctggtggtgacaaaatctcccagcatttgtttgtctgtaaaggattttatttctccttcacttatgaagcttagtttggctggatatgaaattctaggttgaaaattcttttctttaagaatgttgaatattggctcccactctcttctggcttgtagggtttctgccgagggatctgctgttagtctgatgggcttccctttgtcggtaacccgacctttctctctggctgccctttacattttttccttcatttcaactttggtgaatctgacaattatgtgtcttggagttgctcttctcgaggagtatctttgtggcattctctgtatttcctaaatttgaatgttggcctgccttgctaggttggggaagttctcctggataatatcctgcagagtgttttccaacttggttccattctccctgtcactttcaggtactccagtcaaatgtagatttggtcttttcacatagtcccatgttatttggaggctttgttcatttctttttactctttttttctctaaccttgtcttctcactttatttcattaatttgatcttcaatcactgatatcctttcttccaattgattgatttggctattgaagcttgtgcgtatgtcatgaagttctcgtgccatggtttttcagctccgtcagggcatttaaggtcttctctacactgtttattctagttagtcattcatctaaccttttttcaaggtttttagcttccttgcgatgggttagaacatgttcctttagctcagagaagttttttattaccaaccttctgaagcctacttctgtcaacttgtcaaagtcattctccatccagctttgttctgttgctggcgaggagctgtgatcctttggaggagaagaggcacgctggtttttagaattttcaggctttctgctctggtttctccccatctttgtggttttatctacctttggtctttgatgttggtaacctacagatggggttttggtgtgatgtcctttctgttgatgttgatgctattcctttctgtttgttagttttccttctaacagtcaggtcactcagctgcaggtctgttggaatttgctggagctccactccaaaccctgtttccctgggtatcaccaatggaggctgcagaacagcaaatattgctgcctgatccttcctctgggagcttcgtgccagagggtcacccgcctgtataaggtgtctgtcggcccctactgggaggtgtctccagttaggctacatgagggtcagggacccacttgaggagcagtctgtcctttctcagagctcaaacgccatgctgggagaactactgctctcttaagagctgtcagacaaggacgtttaagtctgccaaagtttctgctgccttttgttcagctatgccatgcccacagaggtggagtctatagaggcagtaggccttgctgagctgtggtgggctctgcccagttcgagcttctcagccactttgtttacctattcaagcctcagcaatggcggacgcccctccccctccaggctgcagcctcacaggtggatctcagactgctgcactagcagtgagcaaggctccatggccatgggaccctccgagccaggcacaggagagaatctcctggtctgccagttgctaagaccgtgggaaaagtgtagtatttgagcgggagtgtcccgtttttccaggtacagtctgtcacggcttcccttggctaggaaagggaaatcccccaaccccttgcacttcctgggtaaggcaacgccgtgccctgctttggctcaccctccatgggctgcacccactgtccaaccagtcccaacgaggtgaaccaggtacctccattggaaatgcagaaatcacccatcttctgtgtcgatcacgctgggagctgcagaccggagctgttcctattcggccctcttggaatgaactgagttcacatctctttagaggtttcagtttagccttattttgctgtggcagctcagctcaactttgtccttccatgggcctgtggtgtggggcaaggtggttggatttcaccagtacaacatatctctgttttcctatattatttttagcttaagattttgtcccagtgtacatcgtgggtgcacatattggtttttaatggattcaaataactaacattttaaaggaagagacttgaggcttctgatgtgtgaaccataacaatccaccagcccctaaaacattgctctttggagtcttgttttcagtagttcagagctattcttctgtatgtctgtgtggtaaagtagacataacagaaaatgtaccatcttcaccatatttaggtggacagttgagtggcattacatgcattcccattgttgagtgaccatcaccccatccgccttcagaactcttttcctcctgcagcactgagagtctgttcccatcagcagtcactccccactcacagagcatttgtccttttgtgtctagcttatttcactgaccataatgttctcgaggttcacgcatgttgttgcatgtctcagaacttcattcctttttatggctgaagaatatgcccgtgtgtggctagaccatattttgtttatctgttcatctgtcagtggacacattgctgctcctaccttttggctgtagtgattaatgctgctgtgaacatggatgtacaaatttttcttcaagtccctgcttttagtttttgggggtatatgcccagacatgaaattgctggatcctattgtaattctctgtttaatttttttgaggagctgccatactattttccacaacgtcgcaccattttacatgcccatgaacaatatatgagggttccaggttctccacatcctcactgacacttgctattttctcttttctggcttttgataatagccatcctaataatgggtgtaaggtgacacctcactgtggttttgatttgcattgccctgttgattagtgacgttgagcatcgttttttattttttgttttttgtttttttgagacagagtcttgttctgtcgcccaggctggagtgcaatggcggcaccatcttggctcactgcaacctctgcctcccgggttcaagtgattctcctgcctcagcctcccgagtagttgggattacacgcatgtgccaccacgcccagctaatttttgtatttttagtagagacggggtttcaccatgttggccagtctggtcttgaactcctgacttcaagtgtttcacctgcctcggcctcccaaagtactgagattacatgcgtgatccaccacgcccagcctgttgaacatcttttcatgtgctttttagccatctttaaagtagatcttctttggagaaatgtctattcagtcagagctattctcaatgtacattttaacccaagcgtatatcacatggtgaatttaggtgagtaggcaggggacgggggttgcctatgggatctgactcatttgcgcggctagctctgggtactccaacccatagagacagctaagctgtcaccaaaattcttatctgactcatagtatttacaaactttaaaataattggtatataatttgagacaaaggagattttgttttgacaagaggctggtttgcaaagaattgtgtgattattgtttcagcagtacagctccgttggggtgagacatgtttcttctttgacctcctacatcctcctctagcaaacgaggagaggaataggctctaaggcttcttgcttttgctagtcatacaaggggacttgtggaattggcagctctgctatttggatttcggcactacaaaggatactcgtatagtttgctgggtctgctgtaacagatgaccacaaactgggtgacttagaaaagcagaaatgtgtctctcacagttctggaggccacaagtccaaaatcaaggtgttgacaaggttgtgttccctctgaaggatccaggggagactcgttcttcattgtttccaccttctagtggctccaggtgttcctttgcttgtagccacatcactctaacctctgcctccatcttcacatggcctcctcctcttctccctgcctttcccctctgtatgtctcttataagaccacttgtcattggatttagggcctaccaggcctccaaggacctctattggcccattcttttcctacttttcatgcaaaacttaaggctacgggagcagttaaagttactttttggttcaagaagaactgaatgaagcatttggtgttagtcattatgctattcattgaatgaggccaaagaggaaatgattctttccacccaagtttgcttgcgagtcccagtctttctttacactcctgccccatgctgtcgctgtacacctactttacaaagcatgtccttggttgtttatttgttagccagcatctagttgttgcgacaaccccaggagttagcctttaggcaggacctgggagccgtttccaggacagataggacagcccctgcctgcccaagcttataccgcatggcagcagattagataggggagaactaaagtggtggagagagtccaaaggcagcccaagaggaggcataggcagggagactcctgcacaggaagctgtgttacaatgataataaaattagctgccttgaatggcgtgttgacaggtatttgacacaatcctcataatgaccttatgaggccatttactttacatatgaggaaaggcaagctcagttcttttaaataactcccccgagggctacctgctggtaaggaatagtagctgggatttgaacccaggcagccgactctgggttaatttattgccagctgcactgaggagtggcgtgatttgtgatttctcatgtgtagagggtgagcagaggcttacaagagcagaactccacaggggtgggcttgcttagcccggctggcctagttagcctgtcatgcggtcctgtcactgccccaggcacacgcccctcagatcccctgccagcagaggtcaataaggccttggtggggtcagaggccagatgtgagccatctccttgcccctgtagatgccatgtgccttttcatttgctcacatttccctgaatatctggggaatctggataagaagccagcagtgggcattcgtgattatatcatcactaaataacagtcacttgccccactgaagcccctgcaccttagatgggatatgcatgtatgcgatggagagcagtatgggagctctggtgggtgtgcccacacatggtagtctcatgacccccggccgatatgtgagtgcccactttgtgctgggcactatgcttcatgcccaagttgcaacagtgggcaaggctttggtgcaaggtgccaaaatccttgttctctagctgctttggtctagatacacattgagtcccagtgagttcaatatcagccacatgtctttcgaatgaacagttgacagggcccctaccaatgtgaaggggattctgggataaagggagggacagggcaggcacagagctacagattgacttcaatgcattctaaaaatggccatgacaagtcaagttttgacatacagtttcttaataacttccattatgagttcagaaaaatgttcccccaaatggctcctccagacattgagggtcctgcatccatttcaaggccattttggctttctacatgcccgtaaagtctgtccccactgggacacatgatcatgcccattcgttaaaagtggcaaggagtgtaaaattcgaggtgtggggttggattggagcaatcacagcaggtggaatcccagtgctgcctgccacctcctcactgaagtgttctgtgaatctagcctttcatgagcaaagttagactcttgtcttgtcgtgggttttgccatctccagatgttaggggagccatgactaagtaaattggcaactaccaagaaaacatggatgcaagaccaaatacatcatagtcaagtggcatctttgtgtttgcagttcagtatcatgggtgactgaggagaggagcaccctaagggctgtcactaaagccatactcctctgtttggcaacgttgtcggattttattgctaccgtctccctgctgtgaactgctgggtgcccactgtactctgatcacttctcaagggtttctgatggcccaagatgctaagttcctccacgcatcgtcagggcggctttaacttagccaagcaggagagctccgtctcctattgcactccactcatcccccgtcccagcatcccatgtcctgagctcctagacatgagcccttgtgcccatttcattgatgggaaaactgagctgcagcaaagggaagtgactggagcaattccgtacagttcgtgataggcccagagcaggactccctaggtgtgggcactgctacaccctaatgagcaccacaggggaaatccacgctgactgaagcgtgggagagccatggaaaaagctacaatgccaaagacgttttttatgttgtcactgataagtgagctgatttaactggcctcctgtgcgcctctaatctaacagtgtggtgagtcataggcccagtcgttggccccgttagccgggcatggtggcagacacctgtaatcccagctactcaggagcctagtgtcttgtcgaacagctgtcgctatggttcagctatttgtaaaaacatgaacggggggatggcatctgcccaaaacactaacaactaaagatgttttgacttaggcaacattaatgtctgtctctaactatgtctttaagaaaagaaaagttgattacaaacgggaccatattttgcttcgaaatggaaccagcagttagcgagccaatgagagaccaagtcgcacggactcatttgacagaggacactcccaaagtgaatgctgacatagaaaaggttaaccagaatcaggtaaggagaaagttgacacgtacataccaacaggctgatactatttacctgtgggtgaaaaattgtatttgtacatgtattaatcaatgttgggtattttttatgtaagatatatagctttgtttaagatgtgtcagttacttattgctgtgtaacaatatcagaacacagtggtttaaaagaacaaccatttctttgcttatgactgtggtttcggctgagcccagctggggtgttcttggatggtctcccctgggctcttgcatgtagttgcaatcacatggggaccccttgaagcatatgctcccaggtggccttgctcacacctctggtagtaactggtggctgtcaactgggcaccttggtttgccttcatgtggcctccagtagaccaggctgggcttcctagtgaaatggcagcagtatttattaggcctaagatttagtgtcgcaagtctcagtctgagagaggacttgaagaaattgttgagcctggtcgttgtcaggcttcctggagattcttcacatcagtctgcaaaggtttgctttgattgattcttaatcagtgctgcacttcaaaaatgtggctgggcacggtgtctcacacctgtgaaatcccagcactttgggaggccgagacaggtggatcaccagaagtcaggagtttgagaccagccaggccaacatggtgaaaccccatctctactgaaaatacaaaaaattagccaggcatggtggcagacacctgtaatcccagctactcaggaggctgaggcaggagaatcacttgaacccaggaggtggaggttgcagtgagctgagatcacaccattgcactccagcctgggcgacagagcgagactctgtctcaaaacaaacaaacaaaacaaaacaaaacaaacaacgtaattacatcaagacaaaatgtgtttatatcaaatgttaataggttcaagatccctaagaggttatcatgggccgtgaaatcaccctgtatttggtgtagaactcagagtcaagcctcctctgggcctctgtggttgaagccacgtgccatctgcagttcctcatttatgtaaatttgggttttatggctacttggcagccagcaaacaaaggtggattccaatggttatagcaaactgccattttcagctagtttcaaatttttgtgtccttcgaaataacatttttttctctcattagtggactgattttataagaagtaaaagttctaaatttagactactaaaacaaaaagaacacatttgtcttaacttactatacgttctgcataagacctctctgagaaaagggtcccactgctgacaacaaagcaaaacaagaagggttggaaaaacccagcgccctagactattctgttatctcaagattctattgcaattagattagtttgcctaaatggttttttttctttttttttttttgagatggagtctggctctgtcgcccaggctggagtgcagtggcgtgatttcaggtcactgcaacctctgcctcccggattcaagcaattctccctcctcagcctcctgagtagctgggactacaggcgcctaccaccacacctggctaattttttgtatttttagtagagacgggatttcaccatgttggccaggctggtctcgaacccctgacctcaggtgatctacccaccttggcctcccaaaatgctgggattacaggcatgagccaccgtgcctggcccctattcttaacactgtctccaagaggttgatcttataactcacctcagtaacccattatggagtcttgctgtttccagtcttgagttttatacttgattgttagtacatgttcattcttgtccactgtggctgtgagaagtaaaaagtggtcatgaaaagtttcatgtgatctcctgtaatcacacagcattataggtatgattatcacacatttgacttccctggggtaaaggccagtttgattcccatcactacaagggtctccagggaacagccattggcctactcatcccaaacattattgatagaacatttcaatatcataaaataatccacgtcacattgtccaagagtagcgtactgattagtcacaattaaaatcgtgaaatgaaatcacactggactaacagcaaggttgttttttgaagagattagcaaccttttgaaacacctgtaactagagatgccaaatgaaataaacaaggcagtctgaaatctttcaggatgctttagtaacatatctagttctgactgtctttgggcttagccagacttttagtaaactgcagaaatccaggttgggaaacaggcagctcagagttattctaaatagctacagtttgcctgtacagctgacttgggaggaggggagaagaaagggattgctagaaaagggattgatgtgagttttgtatttaatttggctatgacttgaggaaatatacatctcagtccaggtgcaaatcatgtaacctggtatgattacatgtgtttaggaataatcagaataaagcctagaaaagaacaggttgggaagttagttttgggtggtagaagaatggtgaggctgattttgttagtagattgcacatggacagatgaaggtaaagtacagtgccagctccagctgggcctggtggaatccagtatgagtgctgtttcagatgggacaccccaactgggagggaggtggatctagagaggatgtctggccctggcatcccttgagtctcttgcatagctcaattgtgttgatgtttaaggaataagtagggagatttgtttgttttttaaatctagaacataatttctttaagatctttcatttccacaaacccaagttggatttactgtatatgagctaaggaaattggaggttgtcatcttaaggaggcccagatacagttttagaaagaccctagggaggagggatatcacaggtcctcctcacagacacccatagccagcttgtctggtgtgcagcagccacagtttggcatcaacatcctgaaatgagggtatttaagtgcctgcatgtgctactgtgtcctttcattatgcccagtcaccagagttggaattacccaaggaatcgtgtgtgttgtggaggctgagacataaacaccatggctctccccatttcttcaacttccttgtagttcggaggagggaaagcagagccctgggctcatccatcctcactgcagccccaccaggagatcccatcaaggcggtcttagatttctaggctgaggcaagaaggggttgggcgatgagcccagagccacacagcccagccctgttgtggccagagagggaaagggactgactttgtcctgcaagtatggagactgctttcttctttctgttgttttcagtgcaagctatcagctaccaaatggctgccgttttgttttgttttgttttgtccttagagaagcgcccagggatcagctatcgggaacaagaaggtatcactgttttttggggtattttttagattgtccagttttggtcataggtggtttgatttcctttcactgaatacaaagcatggatcttgtcatcaaacccaaccaaagtcaatctcagtgtcattcgctatctctcttccctccttactgatcccaggagagaaggttagggttgcactagtgatggaacaccaggatgatataaagcttccaacttggctcaagaagagttccaaacaaacaagtatatctgccattgcagtggctcatgatatgtaagtctggactctgtagcttccagtcctcactaccctggtcttccccaccgttcctctctttccacaggccaagagatgcacagtgatcggtggctctggattcctggggcagcacatggtggagcagttgctggcaagaggatatgctgtcaatgtatttgatatccagcaagggtttgataatccccaggtgcggttctttctgggtgacctctgcagccgacaggtaatggaccatgcagccttgctgatttcccacgagcccacgaagggaaaccacgatacttcccttgctcagaagccagccaatttgtttgaaaaacaattgtttcattgtgaaaattttcaaagttataggaaagaacaccacattcttactgcttagaatgaataaccatcatctctgtcacagatactcagctgtgtcctggtagcacaaaagcagccatggtcagcacttaaatgaacaaatggctgtggctgtatgccagtgaaacttgacttcaaaagccgtccatgggctgtattgttccaactgcaaaacaagtgtgtgctgggccacagggtcttgattttttaattgagatataattcatgtaccacaaatttcacatttttaaagtgtgcaattcagtgattttcagtacatccacaaagctgtgcaactgtctcccatgatctaactccagaatatttgtattaccccaaaatgaaatcttgtagccatcccctctcttcccctcccagcccctggccgccactcatctacttcccatctatggattggcctcttctggacatttcatataaatggaatcatgtaatatttgtacctctgtgcctgacttttttcacttagcatgatgttttcaagcttcatccatgttgtacaggtatgaatatcttgaattttattagatggtgccaaatggctcagcaaagctgctatgtcaattttacctccatatccacaatgtggcacaagccccattgcttcacatctttgccaacactgggcataactagactttttggtgttgccattctgagaagtatgaagtggtgcttcactgatgttcagagtcacatgtcctccctgaccaagtaaccagccactctgccactgggtgatcggctttcaggcttcctcctgtgtgaaatgtttgtctgtgtcctttgcccctttgtctttggggttacctttgcttccttgttgatctagttgggatgccaatcctgtgcccgttgtacttattatggatggcttccctcagcctgtcactgggcccttattcttggctttggtgtcattcgctatatggtttgttgatgaaatattaaggccattgcttccgctgcaaagttacggttgttttctctcccgtgctgcccacacctccaggcctggagatggggtagacatctttcatgctcatcattgctgcctccgaaccgttctccctcatgctgctctaagcctctccagctttgaagaggataccctcagactgtacaaaccccgacaccgttccctccttgtggtggccacccacagccgcctgctccccttcccagtgactccacatcatttctcagtgatttcagctcctttctggcattattattggtgaattcagcgttcatgtagatgaccctaccaatgccctcgcctctctcatccttggcctcctctcacccaatgatgttgccctccactcccctgtcatcaccagtaagcacgtcctctccttcttctcagttgcaggcattctactctgagcactagctcctctctgtccagctcatgccctctagtgcctcagctgtcccgattccttaaccccacccagacatccagccatgcccaccatggctcagcctgttcgtgcctcactgcctttagttccctggtctgcttgttcgcttgcatagtcttcaccccttcccctttctcttctggttgtatgtatccataaagtttctccagagaaacaccagcagggggatgtgtggagaagggcaaggagagagatgggtgggtgagacggagaaagagaggttgagatttaattcacagaattggtttacatgattgtgggggctgactaggcaagtctgaaatttgtagggcagaccagaaactcaggcaggaattgatgctgtggtcccacgttagaatttcttcttacagaaacctcagtttcacttttaaggtctttgaactgagtatatactgcctgtccagagtagcaagggtaatctccttacttaaagtcagctggttgtagatgtcaaccacagctacaaaatacctctacagcaacacctacactgtttaatggagtcaccggggactagagcctggcccaggtggcaaataaatgtggccaccacagtgtacttcacattgtaacccccaccctggttaaatcttgccttgtgcatggccatggccctcaagcagacccttggtaccaccaagcaccatctccacaaacctgcccacatccacgtctctactcagcctcccctgctgttcccgaggacgcctcatccccaccaaagtgcccatcctggtgccagctggaagccacctcctcttccctacccagtcactgccaccagggaccttgaggcaaccatatctggtggttgaatctcagtcctcctctgacttggccctgtagcagcatctgatgctttctttgcttgccttctgagataccacctcactcatttctcctcctgcctcactgattgtctcctgatcactatcatttctaaactttgcagactccagaacttattctcttttcttctccaagtttagacagtgtcacagtgactccatcccatctcatggattaattactgtctagaagctgatgtgctccctgcttgttatctccaacccctagctctctcaggcacgtgtgtgtgtgtgtgtgtgtgtgtgagcgtatgtgtgtgtatgcctgctggacatccctgtttggatacctcatggacacttcaagcttgctacatccaaaattaagctcctggttccctgacgcaagcccctcccccaccacagcaaacctatttctgctaagtcttctctatctccataaatggcctactctgcttttccagttccatcaaccaaaaaccttagattcatccctgcccgattcctttctctctcatgcccttcatcccatccatcaggaaatcttgttggctccactcagaatagatccccaatccaacaacttctcaccccttccattgctgccaccctggtccaagccaccatcactgtctcacctagatgttagagggactcttaatggataaatcagatcacaccgccctctgtacagaagcctccagtggcgtccagtcccatgtcaagcaaacagaggcctctgtaatcacccatgaggccctgcacggcacgtccccactacctgtctggcccacttcctcccacacccgcctcatggctctgccccaggcacactggccaccaaccaagtttctgcctcaggacctttgcacttggtgtcctttctgtcaggaatgctcttcctgaaccacagaacttgctccctagcttcctgtaaatctccagccaccctgtgctaaggaacaggcccccgctggtctcccttactctgctctagtttctgcataacacctgccagtacggacgtcctctagatttacttgtttgtttgcttatttgtcctgattgaaacatgattgaccatgagcggatacagagcagaggaaatctctgaaatttgtcctctctaccatagaatgtaaactccacaaaagcaggaattttgtttttcgatcactgctttgtcccctcaaaggagacgagaatccttagcaagctttcacttctctccaaaaggctcccccgctgccatgctgttgttgctagtatgttatttcagctttccttgagtacagatttcaagggaaccctccagcatgccatgttgttctccagccacactcaactgctcagccgcaagcgtggagaaggggcgagttgcatttaaccagggttggagtttactagacaaatttaataaagggagaggggaacaaggcaaaggtggtgctggtggatcatgaaatctaagctaagtccaaggtcgatgtgatgtgggtgaaagacatggcaggagaggaccttttttattttattttattttattttatttttatttttatttttttagacatagtcttgctctgttgcccagactgtggcacaatctaagctcactgcagcctccgcctcccaggttcaagcgatgctcctgcctcagcctccctaatagctgggattataggtgcccaccgccacacccggctaatttttgtatttttagtagagatagggtttcaccatgttggccaggctggtcttgaactccttgtatcaggtgatccgcccgcctctgcctcccaaagtgctgggattacaggtgtgagccactgcgcccagccgagaaggacttttaaaatgtactttcacctgggtgtggtggtatgcacttgtagtcccccagctatttggaaggccaaggtgggaggatcacttgaggccaggagttcaagactaacctggactacataacaagaccccccccatttctttttttttaaaaatgtgtttttatagtcagtagagagagagagagagagaggagagagacagatatacatacatatagataaagtttatgtatatatagttatatagttttatacacacaatatgtattacataacacttttttttttttttttgagacggagtcttgcgctgtcgcccaggctgtagtgcagtggcgtgatcttgactcactgcaaactctacctcctgggttcaagcaattctcctgcctcagcctcccgagtagctgggattacaggcgcccaccaccacccatgactaatttttatattcttagtagagacagggtttcaccatgttggccaggctagtcttgaactcctgacctcaagtgatccacccgcctcggcctcccaaagtgctcggattacaggcatgagccaccgttgccaccgcgcccggcccatgacacttttaaagtcacctcggtcttgtgcatcttttgttgctgacaggaagtctactctcaagccggtcgttgttcgtttgtaggttgtctggctttccctcttatggtttttaggattttattttttatcatttatagtctatagagaatatatctgggcatgagttttagttttgattttaaatcttaacacctggtaggcctgtgcaatctgaagatgaatgtctttcctcatttctggaaaattcttcaaagattaactctaccccttttctctcttttctctctttctagaagccgtgctggacatatggtggtctttcattgtatcatctgtctcttatcctctctttcttgcattccttctctttctctttttgtactatttcataggagatttcctcctccctgcctctgctcatggccaatcgtgtttcacctatattcctcctcagattatgttgaagtcaatcctagacatcatatcattttatctgcaaatatttcagtatttgtctctaaaagataaggattatttttaaaaacattgacagtagttccttagtatctagccagcgttcagatatccctgaatgtcttataaatgtttttgtattattgtttttccaaataaggaaccaagcaagatcaagactatggatttggttgaaatatttagctctcttttaatttacgattcccttcatttttttaaacttcagtctatttattgaataactgatgtttagtagaaaccatgtttatggtgctgtagtatttcccacagtctgggttttgccgattacatccccattgcgtttaacatgcccttctgtcctccagtattttctgtatactggtagatctgggatggcgctgtccattaaggcagccattagccacgtgcaactattgggcacttaaaatgtggcaagtcagaattgagaagcactgtaagtgtgaagtccacaccagatttcaaaaactacctacagaaaaaaggaatgtaactgtctcattaaagttaatttcacctttttctttttactttttaatgtcattactataaactttaaagtcactgtgacttttattatgtttctactggactaaagacttgatcggactctggttcagtttttccctctggggtattattacttctgatactccaatagtaataagcatgcctagtgctcagatttgggtttctatataccatttcccataaaaagaactagggcttcttgggaaaattgctcattctaggaccctagggcaagggcagtacaaaatgagtctgggacattttcttagcacaaaatgaatggggacctgccaagaagatacaagagccaacttgaagggcttcccctggccaaatttgggacattttgagcattttgagcctctcaaaacataacagtagtggatgacaatgcattttgatttcaaaaagaatccgtgggctgggtgcagggctagcgcctgcaatgccagcactttgggaggccaagacaggtggatcacctgaggtcagaagttcgagaccagccttgccaacatggtgaaaccccatctctactaaaatacaaaaaaattagccgggcatggtggcatacgcctgtaatcccagctactcgggagaatcgcttgagcccgggaggcagaggttgcagtgagctgagatcatgccactgcactccagccttgccgacagagcgagacaatgtctcaaaaaaataaaataaaaaagaatccatgggtccatagaaatactgaaaataacaattggggtcagggagaaggggaagctctacagaggaatgccaactaataaatgtaaaggccatgaattaaaaggctagacttagaatgtcaccattttatacccagtacattgattattgttccaggcaaggactatcaataaatgctgaggttaattggtagaattaacatgctacagattacttatcaattgcaaaggaaaaggtacctttttgatggccggaatctggcagccatcatcatcaccacgtgctccaacttaatatcaccaaaagtgggacagacttgcacctcctgaggtaattccctgagaaggacacaccaccactgatgtggtattcttgccaaaaccattaagcctgaatctaatcttgaggaaacagactaatccaaactgaaggacagtctataaaataacccaaacccttgaaaaatggcagcattaaaataagacagaaaagacgggaatttgtctcagattaaaagagatggaagagacctgaggactaaatactacatgtcatgcgcaattggatcctggaccccaaaacaaaaggctataaaagacattactgggacaattgggggaatttgaatatagactaattattggataagaacatcatatctgttaagtttcttgagtgtgatcattgttttatggttatttaggagaatgcttttgttcttaggagatacctgtgaagcgtttagaggcagcatgatgtctgcaacttacttgactggtttcaaaaaaaaaatcatgtgattgtatgtagagagaggaaattgtggcaaaatattaattggcacataattgtcataattgtcttttggtgacaaacatgaatcatacttagatcatattacttaattaaggtttgacaaaatgatgacatgctattagtcttcatttagtagctccagtctttataccttaatgcagaataaatatttgattctttccctttatttacctgaatttttattcttgcttgtggtcaagctgtcccttctttgcccagtgggaacctcttcaggttggcccttgagtgcttttaacgtgaccccggtagtcttagctagctagcatcctcactctctggtacaaggtgtgcctggttcctcttgtgtgtttcctgtcccagatctgcaatcagccatttctctcaggagctcttgttccttttagcagtaaatcaaacagacctgttttaaaaatccctttcaggttgctgtattgtgtcaagtttcacaggaaggaatatgcctgtgtattggctatttactgtctttaatggtgtggaactttttcatgtgattcataatttctatctgagttcaccttcctggggagttttacctcctaggtgcctgctctgaaccacccaaaaggatgttgcctctgtgtggatcccacaggcttctcatgccccaaaccccttttgactggggactagttagtggggagaaggtgattaaagggacaacttggtttccatcccatgtacttcggtatcattgattcttttatgagaatgtatttccatattgattatagaattataagacaaggaacctacaagccacaggttggagggtgaaaacatgagaatgccattgacctgtcaaagcaggaatgattattttgtctttctttgcttttccaggatctgtacccagctctgaaaggtgtaaacacagttttccactgtgcgtcacccccaccatccagtaacaacaaggagctcttttatagagtgaattacattggcaccaagaatgtcattgaaacttgcaaagaggctggggttcaggtaaggggaaggctggagtgagtgctgtcaggagcacgtgatggccctttctaagggtgcaaggccgtagttcttgcagtctccctgggcctaggcggggttgcttcttaaagtgttgggaagatcttagaaatgaagcccttggagtcactggagatggtgaaggtctgcttgccaaggctgatttgagatgtaatattctaactgcacacaaatagaacatctgaggacctcaagcctattggccttcagttaaagagctgcagaacttagacattgcttatatttttattgtgataaaatatatatcacatacaatttaccatcctaaccatttttaagtgcggagttcagtggcattaagtacactcacaatgttgtatagccattaccaccatccatctctaaacctttttcttcttccctaataaaaactctatacccattaaacagcaactcctcaatcgcccttccctacccagcccctggcaactacccttctactttctgtctctatgggtttgacaactatagggacctcacagaagtggactcatgtagtatttctccttttgtgtctggcttttcaccgagcatgatgtcctcaggggtcatccatgttgtagcatgtgtcggaatgtccttcctttttcaggcagaacaatatttcattgtatggatgggccacattttgtttattcattcagccatggatggacatctgtgttgtcttcaccttttggcaattgtaaacaatagtgttatgaacacaagtgtacaaatatctgttcaagtccctgttttcaattctttcaggcatctacccagaagtagggttgctagatcatatactagttctacgtttaaccttttgaggagccaccacattgttttccagaccttgcttatattttaaaagaaaagcaaactgtgtttacccttagccaatagaaacgtgttataactcaggcctgaggggatacgaattttctgcccatcatagcttgctgcatcgttaccaatcctggttcttagaattgtctttagaggactccagccactggctaaaacggctccctgtcagctcagtatcctgaccctcacagggatgcatgccacaggtactgcataaattaagagaaaaacttgaagcaagccagggggttcctctcccaacaacctgtcctggcactgttggctggtccgcagcatcctcagccggcccagcagggttggagctcttctgggcttgggccctggaaaagatcacttataactgacccctagcagttgacaagatgctttgccctgctgaagttttcacctaattagctcctcgttgggtgaccaggggctaaacgatgtctctttgctagtaaatgggagaggtggggtcaaagcagattctccaagtcccagactctgcactcagccatgctgatgtaactggagccctgggaagggccctgctgctctttgttaaatggaaggttgggggcatacaacaaagatttgtgccccaggtgtggcggctcacacatgtaatcccagcgctttgggaggccaaggcaggaagatcccttgagccaaggagttcaagaccagcctgagcaacatagcaataccccacctctacacgaatttttaaaagccaggtgtggtggtatgcacctgtagcctcaactgtttcgggacgctgaggcaggaggatcgcttgagcccaggattttcaggctgcagtgagctgtgatcccaacactacaccccagcctaggcaacagagcaagaccttgtctcttaaaaaaaaaattaaaaaaacaacaagatttgagaataaaacagcacctctccactcaccacagcatttaagaaacaacattactggcatgtgtaatgtgtgcccatcctcgatgccattgctctcttcttgtagccatggatagcaattctgaatttgggtttatttccatttgctccatgtgtaagcaatataaagtattggattgcatgttataagattttatacaatgatatcttattgaacagatcctcctgcaacttgcttttttccccagtgttatgtttttctttattcatcttggcatatgtaactctggtttatttactgaaggggcagagtggcttagtgggtaagagtgcagaaagtgattgctgtgttgtattgaaggaacattttccaacactgagatcaaaagattatttaatgtactttttttcctcaaaggttttaagtgttgctttccacatttcagtctttaatccaccaggaatttatgtttgcttatggtgtgagatagagatctaactttcttccatgtgtataaccagttcagtgccatttattgcataatccatcctttctgcatcgctgcacaccatctgcagcatgtcttaggtgtttgtgtcttacatgggcctgttcccaggctctcccctctgccccattgacctccctgtctgcccatgcagagaagctctgcctttttaggataagtctcagtgtaccgtagataaatcacgcccccaaccaatttcttcaaacttcacttggctattctgagccctttgttcttctacatatgtttggcttaaccagttccttgctaaagccagctgagactgctgttgtaattgtgttgaacttgtaggtaattttggagagaattgacatctttcccatattgagtgttcctgtccataaatatgggatatgtttctgtttatctcgctctttaatgtcatcaatagagttttatactttacttcgtaaagattttgcatatctcgttaaatttatttgtatgtacttcgttttttgttatttaataactttctattacattttcagttattgctaatatataagacgagttaatttttgtatattgatttttaattcagcaactttgccaaacgctaatattttctacatatttgcctgtgttttctgtgtagatttttctctcatctgtaagcgatggaagttcagtttcttttcaaatcattataaattcgtgtttatcttaccctaccactctggctagagcttctcatacaatgttgaataagaatgggaacgatatgattcatgctaatggtgttcagtgttggatgagcttctcttaaccagcaggctggacgctggggaccctcataagagaatatcttcctttagaatagcatttcttaagaggtcgtgtggtgtgtgtattcctatgtgtgttcacatggccaggtcactatcagaatagccagtgatctttttcagacatcttcctagaagtttgcgggctgcccttcacttacaacagagaatcgctgtcatagtgagataccatgaatgcaagtctattctatctctcaggtgtgatgggatagaaaaaatgtgttatcccttgttttgaaaccaagatctcttgattcttggttagaatgtaatacatagtgtgtctggaatccacatagctgcaaaagatggtgatctttggattattttaagaaggcatgaaaagcaaaggcattgcagcaaataatttcttcagtgcctcgaatgcgagggcaacaaagggatgcccctgattctctttcatacaggatcatgcactgtttgaattgtgataatttgtgacttttattttttctgaccttcctctgtcagaaactcattttaaccagcagtgccagtgtcatctttgagggcgtcgatatcaagaatggaactgaagaccttccctatgccatgaaacccattgactactacacagagactaagatcttacaggagagggtatgtaccttggaactggttgagtgagcagactgaagggtttagaatcctaagaaaaatgtttatgaacttatgaagtttgtattctgaggcctacgtacctgatttgagatgtaaaatttgtgggtgaaattaaatttaaaaatactgtgagaggccgggcacggtggctcacgcttataatcccagcactttgggaggccgaggtgggtggatcacctgaggtcaggagttcgagaccagcctggccaacatggcgaaaccccatctctactaaaaatacaaaaattagcccagcatggtggcaggcgcctgtaatcctagccacttgggaggctgaggtatgagaattgcttgaacctgggaggcggaggttgcagtgagccgagattgtgccattgcactccagcctgggggatagagagagagagacgctgtctcccaaaaaaaaaaaagttactatgagaacagctttatgtggccagacactgttctgagtgttttccaggagtattttccttgtttaaaggtcacaattatcgcatcatcaccagattatagatgaagactgtggtgcacagatgcacagagaggctcagaacctttctaaaactgtgcagctaggaggtggctgaccccaggcagtctgtctacagagcttacagcccaccctcaatgccatgggagcttcctcgcctgctatgggaatttacagcagttgcaagcgtgcagacaggaatcaggctggaggcaccttcctagtggcactctcaccccctcccttacttagaaaaacaaacaacggaaggatcttgctttattttaaggaaaaagtacttttccacttggcaaaacagcttcatcaaagggcacctgattttagtatggttggattcagccacggtcgctaccaagccttcaggctgctggggctgtggggcccctgacaactgctagctgcagatggggattgtcaccctgaggccatcctaagctgcaggccaggagtgctcctgagcctgggatagctcgtcttagctgggtagctgtgagtatacccctcccaggtgtgtgcagtgtatcacacccactgaggttttctcgcaaagccggtacatgctgtactggagctgaacactgacctggctacctgagagccagctgcctcctggctgtttgccgtattttttttttttttcttttttgagatggattctcactctgttgcccaggctggagtgcagtggcacgatctcggctcactgcaacctccacctcccaggttcaagcgattctcctgcctcagcctcctgagtagctgggattacaggcgcgtgccaccatgcccggctaatttttgtatttttagtagagacggggtttcaccgtgttggtcggatggtctcgaactcctgacctcatgatctgcccgccttggcctctcaaagtgctgggattacaggcgtgagccaccatgcccagcctgtctgctgttgcttcagctcagaaagtcctggcagaactggtccacagggagacacaagggccacccagaccaggggtggaggcttgaactttggcaagccacagtcctggctccagactatgctgtcttgctccttggagcactcatgtgctcgaacttggcccaaggagtactaaagcctccctgcgccttgcaggcagttcagtcaccatggagaccctgtgtattctcaacccaatatgcctgattctgattgccaccagagctgagcccatctaggctcaggagcttcaaatgatggccttggcccagaccatcagtgtctcgcttatatcaacttttgggttctcaactggaaataagcaaagcctgcagatgactccagcagtaactcaccggaagcctcctttcagccgaggttgacatccactgttggctttataaccttcctactgatcataaaccaaatgtgatggggagctaggactccttcacctctcttccctttagtagtagagatgagccttggtggaagccatttgagggtttatttagtcatttcctccatcgctgtggggaccagagtcctggcgggaagaggagggccagctctgggaatctgttgagaggcagcttttccattgttgagttgcttaagatcactggggccaaaacatagaccagcactttgctaccatagagtagaagaaacccgaggtgacatgacagcaggaaccgtacttaccaagcatacagacacgcactgaagcaactcacatgggccatctcatgtaattcgcatgcagccccgtcagggtaggtacctttatgatcaccacttttacccacgataaaacaaatcctttggaaagttttgttacttttgaggcgaaacccatttcactgtgctttagactcttgagttctagtttgtccatgaagtcacacagaagtcaccctttccttgcggtggcaacaggagcactggctctggaccaggcactgctctgaggactttacatgtctcggcctcctttgccccccagctgctggcctgtttctccccaggcatggtcttcagacccttcaccttctctgaccctcttctgggcccacttgggtttctcagagccctcccctcggaggtgatactcagaattgcctggaacagacccggcctggtggaaacgtgggcggcacatgcagttcaagtcactggaggctcacggctaacttgtttgccagaacctttggacgttttccacaaactgctgccgaggcatgtcttctggcagtgttggtggattttagcctttgaacgcaaaccagggccttctgatttgatcttaccagtttttgcccagctgtctgtcctgcattttcagattttggtgtgagggtgggtggggtagagaggtagcccagaattataccagccactgatgtaggttgtcagctcaaggcagaccactgctcagtggccacatgccagcagagtgtgtcatctgtctgtcccccacgagtggtgcttctcacccagcgaggcactctcttggcttgggcctaggaatttgcaatggacgtgccccttctcccactctcctccaggcagttctgggcgccaacgatcctgagaagaatttcttaaccacagccatccgccctcatggcattttcggcccaagggacccgcagttggtacccatcctcatcgaggcagccaggaacggcaagatgaagttcgtgattgggtgagtcagcccacagcggctcttccctagtccttcctggtccatgctcgcattcagagagcacttggcaggagccacatggcattgtagctcttttcttatgtgactgtcttggtccatgcaggctgctgtaacaaaatacctaagactgggtaacaaacaacagagagcttggaggctgggaagtccagatcaaggcgttcccagactgggtgtccattgaggccctgttcctcatgagtggcaccttttcaccatgtcctcacatggtggaaggggcaaacaggctcccttgggcctcttttatgaggacactaatcccattcccgagggcagagcccccatgacctaatcaccccctaaaggtccctcttcacagtaccattgcactggaggttaagtttcaacatatgaatgttgcggggatgcaaagattcaggcgatagcagtgaccttgtccgctgtcctctgtattcatttcttgtagttgccataacaacctgccacaaagtaagtgcttaaaacaacaaatggattctgtcacattttgggaggccagaagtcctcagttaagatgttggcagggctagtgtcttctggaggttcgcagggagcgtctgttccaggcctctgccctagcttctgctggcttccagccatccttagcattctgtgcttggagaggcatcactcctgcctctgcgtccctttcacatggctgtgttccttgctttctgtgtccaaatttccctcttataaggacatcattccctggatttaaagcccaccctaccccagtatgagctcagcttaactaattgcatctgccgagcccctatttccaaataaggtcacattcacaaggcccaagtggacagaagctttgggaggatactgttcaatccagtgtaccctctcaggtaggctgggaaggtatttgtgaccctgtttggaaattgaagaaaccgtgactcagagggaaagcaatgggccccgggtcaaaggccagggcttgactgtccttgcatctgggaaggcaggcgggggcattacttttctcctcgggttaagtgcaggtggaggggcctccacaggggacaacagtgtgcctctctcccaaataggctttctcttccttcatttcctccttttctcctctctctcttccttcctttttccctctgccttgccttcctgtttctcactcagcctcactgctaccctgacttgtcaccttgaaggattacagggagactggtcaataaacggaggaccagagcaaggcgttggccccgtgtctcctgggaaggggctgaaaagctgctacccaaatcgggacaggagagacagcaccagtgttggccatgctggaatgggtgggcaggtcccccagctttcagattccactaaccctgaagacccaggagtcccggcccagtgtacatctttaaccagtacaggcatccatgagtgcctgggccggccttgccaagtgaggtggcagccattctgtaggtcacagtctctcaaatgccaagacttgggagtggccctggccttcgtgcaggggctcccagcacgtattccatcatcccttgtgcacctgcagaaatgggaagaacttggtggacttcacctttgtggagaacgtggtccatggacacatcctggcggcagagcagctctcccgagactcgacactgggtgggaaggtaaggcctgctgcaccggtccctgcacaggtgcctttctgcgggtttcttctccttgccattggatttgctggcaagttgctcctgtgatcctgtatcatggaggatctgccttaggaccccctgtgccaagatcaagcccctctgatagagcatgtggtgtcactgcagcgtcacatcacttgggcagccaaatttggagagctgatgagctgggattgaacagacattcaggtcacggtcatctatggtcccctgacctggctgcccacctgttggcatggctccttgtggcaggagcccacgtagattgggcagggtgcttgctcctcaccctttctcccactcattcctcaggtctctccctcccttgctgtttggtcctcttttattctcctgaacctctgccgttttcccactgataaccttcaaataagttgggaatagggtgggtgtggcattttttttttctttttttttttttgagacagtctcactctgtcaccctggctggagtgcagtggcgtgatctcggttcactgcaacctccgtctcactggttcaagcgattctcatgcctgagcctcccgagtagctgggactacaggcacatgccaccacgctcagctaattttttgtacttttagtagagacggggtttcaccatgttggccaggctggtctcctgacctcaggtgatctgcccgcctctgcgtcccaaagtgctggggtgacaggcgtgagccaccgcgcctggcccgggtgtggcttttgatttaaaacaagcagaacaccgtcaagaaatgtaatatgaggaattcattgcatccaaagatatgtagatgagttttatgatgattaacaattatcaaattaacaaatgtgcctttccaagtgcaatctatgcttcatttaaaatcctggcccatagatgaaactttcattgtctgccctttctatgccttagcagttgtgcaattgagggcaggccacgtggaaagctgcagcaattaggcagtgagaatgcgatctgcacgggcttaatagatgcttcaactttgggcaggtgggggtggtgtttctaacttcttgttcttgttctcccgccaggcatttcacatcaccaatgatgagcccatccctttctggacattcctgtctcgcatcctgacaggcctcaattatgaggcccccaagtaccacatcccctactgggtggcctactacctggccctcctgctatccctgctggtgatggtgatcagtcctgtcatccagctgcagcccaccttcacacccatgcgggtcgcactggctggcacattccactactacagctgcgagagagccaaaaaggccatgggctaccagccactagtgaccatggatgatgctatggagaggaccgtgcagagctttcgccacctgcggagggtcaagtgagggacactggaggctgggctctctcgacacgttgctcagccagtcactccttcccctgtggattgatgaaataacatcctttgaatgagtttgctctgagcctgtgactccttctgctaggcagagagcgcaccctactctttccgtgacgatgagggcggcaaaaacagacatttcttccttcatggaactggatttggatttcttgaagcaggcagcttcatattataccgatttgttctctgtctttttgtgtctctctgtttaccccctcccttgccccctcttctggtttatacatttcattccagtgtccttgtacataatcaaggaagctgtaggaagctacaacccatttgttagttctgatggagaaccatttccatgcagaccaatactagagtgaagcctctagactttgttcaagatactctatcttcaaaatatcccagaagaaaaacagaagctgttaacacacaggtgagactttacatatacatttcatactgacagtgagcttagagcaaaagctgaaagctgaaatgactgtaattcctccccagtctctgttgcttgttcaactccttacatgttccacattctctttcaggtacgttgccgtgcctgcctgcattgttttttgttgtggtcgttgtagagacagagtctgagtgtgtctgttgcccagctgagagtgcactggctaatcacaggcccaatcatagagcactgcagccttgaactcttgggctcaagcagtcctcccatctcagcctcctgagagcaaatgtgcgccgccacagcaggcttgcactgttttcacaaaacatttctcttatcaacagagttctgttgttttgagaggcaaggcagtgatccagcccagtggcaccctgtttcatctgttcagctcctctcctaatgtgggacactgggctgggcgacagtaagccagggagcaggaggggctccttccctgcagctcaccctcagaacccttcaggccagtttccaaagggcatagcgtagaggataattcctcggaatgaggagagactgtgctgccctctgctgatggggcagggggatataaacataaataagacagcctttgcccctaaggcacttagaatcatggacttaagatatgttcgcaagcccctgtaatgccaggcaggacatgatacacacacttaagacgcagtggtgaatgttcagcttctgtcgaggaggtgatgccttgagtcggaccttgaagaatggataagcagtgagacttcactgtcgaagttggcatttcaggctaaagatgtcagagggtcacagtcaatggcatgtcatagtttaattagcagcacgttgtgtttcttaggggtccatgagataacggtgtcttagattcagtgaaggacagacgtgccagcctggtttggctgatggtgcaaagctgaaggggatgtacttttatctcccaggcagtggtggccaagaatcaaggaaaccatcgtggctcttacgtggagccttcagacaagaagcaacaaaggcccacgcgatgatggagttgggcgggggcggtagggttgggggtagaaatgaagccttacaagaaatggcctggagggggtccgcgctcagcacctgatttcctgtggggagtgagagggagggaggaggccactcaggctggaatgaagccgcagagcagctctaagctggtgggaggatggtgtcgggcccggagtgggtgaggccagcagaccttgctgatgagcaccaaggaccaaactgccctcagcttcgacctaaccactcgctcagaaaaatactagctgccatctagaccaaagatgtccctcatggaacctcttctctgccctctcttcactcattagaccacagataatcgttgggccctgccctgcgcttcagtggtgaataaaacacgcagcccacagaccaatagattattcaaaactgctgaagtttccaaaaaagaaaagtgcagggtgctatgagagggacatagggctgcaagcaagcctggcccaggtggcgatcacggcagaacagttgcagaaacagtgcctgctcagatccgaaaggtgaggctgtgcacagagaccctgagccccccgctggccaagctgacgacctcccagccgctccttgtatttccctgcattcctgacccacacctatctcgacccacccgtttggagaaagtctaaccaccaggaaaccataacctcagtacccgctgagagcttgttagaaaccatcaggccccaccccggagctactgaaccgagaccctgggcttgggccagcactctcttcacaagccctgtggatggtttctgaccagtgaagaagccttcctgcagatcactgagtccagctagaacctccccttggctgctgcaagactgaacttgccctactcacaggcccagggcctgggggccacccccacccatttctttcctgacagctgatggcatcctagagtgcggacccaggcctatgtctgtccctcgtgtcacatcccatctggagaatcggggccaagggaaggcagttctctcccagattggggacagctagaagccctattgccaagtgctgcgtgtcctttgggatgatcgcattcaatccctcttccttcccttccctatcgacactgacctagttcagcacctgaccccatctgcacctaggtcaggtgtcctgggacagccgacctgatctgtctgcttactttcgcccctcctcccatccagctgctatgtgtacacctagggtatccagtctctctgctaaaaacactaaagcagggtccgattttctcccagcccacatttccagctccttccactggtcttcacacctgctgtgttgtagccaaatggaaccacggtttcctgttcacgccctgtcatgcatcccctgctcaggctgtcatgactgcatgcgatgtcctctccccactgtgtcccagctccagaatggcccgttcccttcccctaaaaagccatgcctaatcctcccagttggaaaccacctcttttctctggattcccagcctggggcccctgacctgtacctcattttgtgtttcctatttgtgctttttcctgcccccaccaggccaggagttcttaaggacagaggcaatcagtgtccccacagcatagtgggtgctcaggaaacctccctgtcttggaatcctggagtcacagtagcaacaaaagaaagtggtcccaggaatggggaaaggcacagcccatgagactgggttgaagcagagagaggttcccaacctgccattcagatggggcttgaggagtctgtgaactccctaaattcgatgcagcctctgggggtgtgggtgtgtgtgtgtgtgggggtgtgtgtgtgtgtttgtgggtgtgtttgtgtgtgtgggtgtgtgtgtgggggtgtgtttgtgggtgtgtgtgtgtggggtgtgggggggtgtgggtgggtgtgtgggtgtgtttgtgggtgtgcgggtgtgtgtgtgggtgtgtgggtgtgtgtgtgggtgtgtgtgtgggtgggtgtgtgggtgtgtgtgtgggtgtgtgtgtttgtgggtgtgtgggtgtgtttgtgggtgtgtgtgggtgtgtgtgtgttggcatgaaagggcacatggctttcaccagcttctcaaagaggactgtggcctaataaaaactagtgagtggagggggccagcagctgtcgggggaggggccaggagagacatgccaagggcagagtggggctcccaggcctcatcgtcacccctgtgtgtgtgtgtggctggctgttccatcatggggtccatggcttcaaaacagggaagcactggaatccacgaggaggagggcttgccagacaggatggcaatggttgaggcctctggccccagccctctgggctctggtgcccattgcccctggaagattcttagctttctggatgagacagcccttgctagtagaaagctctaccttctgctgaactgaaacaccattggatgtgacttcccttgtcctccctcatttcctccctcaccaaaccccagcaagtgcagcttacacaggcgctattccctccggtatcccgcagctcatcagcagcactgtcctctgctcagctcacctgcctcagggcacctggtcctgcagggccagccactcttcttcaaactccatctccaacatcatttcttctttgcagctgtcccccacaggtctctctggcttcatacaatggctggcctacatctccatcaaagcacttcctccatcacagggcaaccatccacttagctgcccagatagagctctatgaactgctttgctcctcaagggcttttgattcgttacctgttccagggaagtaagcatgcccagttcatgtgccaagactccaagggcatttacaggagaaagccagcaactcattggcaatctgggggagccccagagaaaagaggccatggccaagggcactcaagggcagttagcagagccagggctggaccactagctcctgatcccccaggccagcgcaccccaggtcacccattcagatccaggcagcctaatgccacataggtgcccatgtgggaaggaggcagtcaggatatgggctccaccctgaggttctcttaacatgaagggctgaaaaagcacaaattgatcattaggaactgtgagaaagaagatatgttggcagacactagaaccttccattccagtctgtatctcttgtcaccagcactgcctagtcattgatcgtggaaggctccaaaagatggtggacccaaagtcgagactctttgccagctctgcctcttaccggctccaggaggtctgttcatattaactcattcggcccagagaatttcccaaagaactttctagagtgactggggtaggggagaaaaggagggaagaggatggaggcctctcagcttcttttgtcctgtatcacagcctggctcccagcaacacttttgggatgcctcttgtagcaggtactgggagacatgcacaccactggctttgttctccatggtgggcagggggaacatcaattcaaaacattttaactgggcacctgccatttccctcaaagagctcacagtcccatagaagaaatgaaatgcagaaattaataacccaagcactccttcctttaagagcagaggtcagcaaactatgaactcaggctccaatctcgcttgccacctgcttttgtaaatacagtttcgttgtcacacaaccacatccatttatttacataatgtctaagactgccttttcactacaatagcagagttgagtagttatgacagaggccatctagcctacaaagccagtcaaaatattgactatcttgcccttcatagaaaaggttttgtgatggaagaatgaggtcagagaaaaaaagaagaaaaggaaaggtttgtcaacctctgcttaagagggactgagaggccacgagcacacgatgcttagcatcactaatcattaaggacacgcaactcagtaccacgatgcgacatcgcctcatcccattaggatggctactatcaaaacaaaaaaataggccaggcacaatggctcacgcctataatcccagcactttgggaggctgaggcgggcagatcacttgagatcagaagttcaagaccagcctggccaacaggatgaaaccctgtctctactaaaaatacaaaaaattagccaggtgtggtgacaggcgcttgtaatctcagctactcgggaggctgaggcaggagaattgcttgaacctgggaggcggaggttgcagtcagccaagatcgcaccactgcattccagcctgggtgatagagcttggacttgataactccctggagggtgacatggtgacatttgtgtttggatggtggggagagtgcagggagagggaccagaggtggggcgccagtggggaactacctctagtccaggggagagacggtaagagtgtgtctgtcctgaggaacaggcaacggggctatggtgcagacgtaatgaagagatgattctgtgcaagaatggaccatccatgatgattgattggatgtggggctaagggaggggaagggataaagagaactaggaggctgaagcttagaagaattggtggccagccatgccttctgctgagctagggacccaggagaggatgagatataggtagcagcaaggaagaagctgaattccattctggccataatgagttgaatgaaccttgcagtttccaggtagaaaagtctagaaggcaagagatagttatttcggacatcttggcttattgctgctaccgaaagccacaggaaaagcaggaggatgaaaaaaatgggaccctgagaattaagaagtgaaccaaatacccaggtgtcaaggaaagctagggaggagggatcaagcttgagaggatggtcagcagcgtgggtggtgctgggaagttaaagaggctgaagactgagcaaggaaatgtccctgaaatctaacactgaacacccactttataactggccttgtgctgggggtaagggccaccgtggtagacagtctatccaagagcctttccagagctcctgatctagctaagggaaagaaccacagttgatgccagctgagctaagcggccccagggaagctgcagcacagcctatttggcagtacacttgtgcccagcgtggattttcataccctgctcatggacttgtgtcctttcttcatcctcccttccatattcttccttgatggcgctcttctcaaccatagattttcttagaccttttgggggcccttccagcttctgacccagacagtgctagccaggccgtgggcactacaggtttgttgagtggttttgatgggagcggattagaggaaaaaccaaagatgaatgctgagcaagatgataggagcagggttgtgggaaggagagtgcctcctcagccagccagtgccttcccaggtggtcaagcactttctccttggatcctcaacaagcctgttgagtccagcaaggtctcccaatatccccattccccattttgtatagggaagcccaaagtttcagacagggaaaggggcattctgaagatgcacagcaagttagggacagcatccttttcctcaatggccttctactctcttggaataatgttgagtggcctgaactccttgcctctgtactggctgggaacactggatgtactcctttcctatgactgctgtatcagattaccaccagttgagtggcttaaaacaatgcaaatgtattatcttatagttgtgggggccagaaccccaaaatcagcttcactgggctaaagtccaggagttggaagctctgaggcttctggaggctccgagggaggagttccattttctttcctcttttgagcttctggtggccgcttgttttccttagcttgtggccccttcttccatctttgaagcacattactccaatctctgcttctatggtcacatttcctgctcttcttctgtagtaaaatctccctctgactttctcttatgaggacacttgtgattacacttagggcccacccagataacccaggataatctccacatttaaagatctttaacttaattgcatttgcaaagtcccttttgccatataaggtaagaagagtaacaggtctcaggggttagaatgtggacatgaagctggctaagagaggcaagcccttgggtaaagcgtcacctcacaaaagaccctgcttggcttcagtaggctgaggaccttgaggaaactctgctagatcactacagccctgtctgccagaactatccagatcgttcactgggctggtttggcaccagctagtgattgtgaaaactgaacagaagtcaccaataggatggtgccaacttagtgctagaaaatgtgggaggatcggcagggcaggttcacaaaggcccgagaatccagcggcccaggtgagcaagtgcctgtcccagcactgcctccaggctcgggactggggcttccaatcctgggtctggacttcaggtcctgcaggggagggactcagacttacacatcctctttgtaccttgtttgctgctgggattagaatttaggggagtgaagttcagggacgaatctaaggcctcccagccaaaggccatctagccacagcccaaacaaaggggcttccaacatggtcctaggtggcactgagaccaagcctgcagagactgggccctgtgagagaggcaaggcaaggccccagggcactgcaggctgttcaggtgagggcacctcatgccactgtggaaccaggagctcccaaggtccctgttctgtcagcatgagtgtctgattgctcccttcttcaaagccggctctggctcggaacgctgggtgctgagacactgcctttggtgagcatgggctgcttaggagctttagagggactcctgctgaactggggggcctctctctgcaatgccttctgccctgtctgcctgcctgactcccacatgtatctctatgggctagtagcctggtcgagtgaggctccctctgtgcctgtccagtttggcaccagctaatgattgtgtccaggggctctggacctgcctctttctagaccaaggagtcctcaaaggcagggtctgctgggagcctccctgtgacccctgcagtaccagcacaggcattcgtgccatgagttgaatagaactgaagagaagggagaagcttcccgggggtgggcaagaggaggcttgagagcccaggaataatgataaaacagtaacggcccagggctaaaggaatcctccagaatccgagttctgtggatctaagttggcctgggactgcctgaggatggggcaggccctgcccagagccctcttggagccagcctccagcacctcctcagcctgaccttccaccttcagtgtttagagctgagagagcaggctacggggcacataggtcagccctgcattgcttacacaagtgggccaagactccaagaggggctgagatttggccaaggtctttgaagaaggaatgcccattcatgaaagaagagctattacaacttctgtctcttcccagagtcttctttccagctcttcctagaaaagcatggcctgctcagtcattctcaggttcctgtgctgagaacaggagtgaggaagggaagctcacaggaatgaagcacccactggccactggagatcagatgggcaccattatatgttggatagtattcctccaaaaaatatgttgaagtcccaacacccagtgcctgtgaatgtgaccttattgggaaggagaacatttgtagatataatcaagttaatatgagatcattagagtgggcactaatccaacatgatggtgtcctcataaggagagacagagacacagacacacgtgggaagacagtcacatggagatggaggcagagacgagtgatgcagccacaagtcaagaacacctggggctaccagaagctggaggagacaaggatcctcctctactcctgaaggagcgtggccctgctgataccttgttcttagacttctggccccagaactgggagataattcatttctgttgtttccagccacccaatttgtggtactttgttccagctatcctagcaaagtcatacagacactttcacaaatgtctcacaacagcctctcagccaggcagagatggcagcattggctccgtcttctcattctaatgtcaactccttgcattacctctccaggcttgccaccgccccaactgtgaataaacagtgctcctcatcttcaaagccctttggaaatactaattaactctcagctaattggatgaaagaacgtgaagctctgatgacatcatctccattctgtgcccagatctagccacaagcgaaatctgggactgctgggctatgagccttgtcttgtgggaacatgttgtgcccacgaaacatggctggggacggccgtctactcactttagctccatgggcttcagaaaacggccagctgtgggcacacttggccaatcaagcacgcataacacaaacagtttctgtgattaagagtttgtgtgggtgtgggtgtgtgtgtgcgtgtgtgttaatcacatacctttgcactctgcacatcactgagattgtcttattggccgttctaaacagaagcttacaaaaacatgtgtactttcaaatctcctcagaatgcatccctgtgatcctgagggcctgtgtaccccctgccttgtagaaccaagaagaatccctctgcgtccagggccccagggggtgagcatcagttgagctgggcaagtagctgcgtgcaaggcctggaggcaagagcctgcaagtcggaggccatctgagccaggagccagagctgagagagattccgaccaaggccagaagggcgtgaggaggaggtgcagggctggggctgtccccacgacagcagggtctttggtggacagacagcaggcatgctgcagtggacagggtcaggagacgagggttagaatcctgcctttgactttgccactcattaacctggacaacagtgacaggcccattccaggtctccctgactccgtgcgatctctccttcatcctccaccctgtggccaggagcaccatccatgcaccaggcagatctgctcctggcactgaccactaaaaacctcacccgtgtgtcccacgggatggacttgaacatgatgggtagtacaatgaccgtctttgttcaataacaaagaaagaaagaaaggccattcctgctcagttatctttcaatccttcagatcatgaaaaaagatcaaaaaaactaaaaaaaaccccaaaacctcagagttccatgctctcgtgttttttgactttgtattgaagcataatatacattttgaaaagtgcatgtcatacataagtataacgcttgatgactgcccacaaggagaacatatccatgtcaaagcacccaaaccgagaaacaagatggccactaccctgacatctaggagcagaaattagtttcacccatttttctgttttatttaaaagaaatcggccgggtgtggtggctcacacctgtattcccagcactttgggaggccgaggacggtggatcacctgaggtcaggagttcaagaccagcctggccaacatggcgaaaccctgtctctactaaaaatacaaaaattagctgggtgtggtggtatgtgcctgtaatcccagctacttgggaggtcaaggcacaagaatcacttgaacctgggaggcagaggttgcagtgagcagaggtcgtgccactgtaaatccagcctgggcgacagagtgaaactctgtctcaaaaaataaaaataaaaaataaaaacaagaaatcactctatatgtgctcttaggtgtttagctttcttccctcgacattatgtttgtgagctgcatccatttgtttctacactcattgtcattgctgtagagcattacattgtgtgaagacaccataaattacttgttccttctaccttaatgggcattagggttgcttttggctataacaaatagtcctgctctgagtatttcttgggtacatgtttttaaaaacatccgtaggctgttgagtgggaacctgaaagtgggattactaagtcagaaagtatgtgtgtatttggcttcagtgggtaagctgagtttcccaagtggttgtaccaatgtaccctccccaccagtaaaatatgagtattctagttgccaacaatcagtattttctgtcttcttaattttattttattatgttatgtatgtatgtatttatttatttctttttagagacagggtctcactctgttgctcatgctgcagtgcagtggtgcgatctcgggtcactgcagcctccaactcttgggctcaagcgattctcccaccttagcctcctgaatagctgggacaacaggcgtgcttcaccatgcctggctacttttttattttctagttttttgtagagaggagggtctcgctgtgtttcccaggctgttctcaaactcctgcactcaagcaatcctcccacctcggcctcccaaaatgctgggatcacaggtgagtgccactgtgcccggcctggagttgtttatttgtttgatgtattctggatgagggttttgttgaagatgtgtatggtgaagatctcccacatgttgagtatcctttcactttcttaacagtgtgttttgatgaacagaagtttctcactttaatatggttcaatttatcacatttttggtcacactcagcacttttcgtgtcacacttaagaaatctttggctgttgccagttcacaaagacactctcctatgtttttcttctaaaagctttattgttttacctttcacatttaggtctgcagtttgtgtggaactgatttttttatatgatgtgtagtaaggattcatagacatttttttttcccatatgggaacccaattaacccagcactttttgttgaaaggccaatcctattcctactgccctgccctgtggtgctagtgtatctttagcttctcaaacacttgataactctctgatttgctgttgtaagtgttaatgagttaaaacagttcagaccccagttatcaatcaagcacttatctaggtggtgttgtgaaggtggtttgcagatgtgattaaagtctttcataattgactttaagtatggagattgtcctagatcacctgtgcaagcctcagccaatcagttgaaaggatttaagagcaaagctgagactgccctgaggaagaagaaattctgtctgtggattgcagcttgggcccacgtccaagagttcctgcatgcccttcctgacgacctgccttatggattttggacctccccagtcagcccccaccaccacataagccaattctttctcatagatctcttaatatgtatctcctactggttttctttctctgatggaaccctgtctgatacatgcctccatctcccaaacaagaccgaaatggtttcaatagtaaattcactagccattcaccgcagactaggcgaagagggaaccctcactaatgggaatggaatggaggaggaaaatgagtctaatctcaatcatgaacatagatttaaaaaagaaaaaactctacaaaatcttagccaagtattcaaaggatcttatgccatgaccgagttcatgttggtatacactgcaattgcaaaccaagtcttgccaggccaactcatcttaatggaaatgatgaaattcagttgagaacagtggcaggccaacagtgaaacttttgaatgaaatgcactttaattcaatgtcctcatccttgaatgtcttcatatctttattatccttggtactttcatgccccaggacccaaagctgagaaaccagcttgaggaagcatcctgggcccacaactgatttggttccacccctacatctctctcctaaaactccctttctcactgtgtccacctcactcagaagcagtagtcctcagtccttggagcacacctgagtctgcagggatacctgttaaaaatgtgagctgtctcctggggcaggttagttgacctagtggactcacgtctctgaaaggttccagctgacttgcactggtatctaggctcacccactttccagctgtatggccttgggcaaatgatctccctgctctgaggttcagcatcctcccgtgaaccacatagcctccctagcccaaaggggagggaagagtcacagctcctttgcccaccatgcagggtgccgcatggtggtaagggcagcagccagtggggagcaagggaagatatcctttgggcagcctgagtccaggaaacacagctctgcctcgctcagccccagaaggagccacacatctgccaggatctcagcagggtcaacaggagcagccaggctgagctcacatctccctgaaagaaagacagccgtggggcgtttcctgctggggacaggtggagtgaagtccttgctctccttgcaagcagccgaacattcaaagcgaggctgacaagttcaagtcatcctctgatccttctagaaatatcctgctaaaagccaatcacatgttttctttcaaatgtgtcattttgcacagatgtttaaactctggcataagcagcaggttgcatcagcctctcttacatctaaggcctgcaggatcccaataatttaatgttgaccaaaggaagaaagcctccttacaaagtggcagaaagaagaggatcaagacctcaaggagggttttctcaggacacctactgacagaagcactgtgcatcatacctagcatgtagtaagccctcaacaaatattagctttattattagcattgttagcacagctcccacgaacagtccccgatgccgcatgtaagtggctaactgagcaatttgaacccagtggggtaataatcttggaagttaagagtccgggctctagagtaagacagcctaggtccaaatcccagctccaccactcactagcccttccgtgccatagagtcctcatctgtaaaatggggataataatagtatttacgtcatagggctgtagcaaggatggaatgagatgttttcagtagagcgcttgggacagcacctgacataaaaagcattaagtcaacatggaccctcaaatcacccccttcagctgagctttgtcaaatcggccttgcccatctattaacagaatcttgagcaagtttccgaagttactggtgtcttgcagttgttaaaactcagaccagattaaaatgtcaatctcagactcagtttcactcttccctgagcccctggctgctctgagaccctcctgccgccctaccctgtttgggaaaatcaaaggacactggctgtctcatgggaagggggaggagtgggggaaatacatgagcccttttgaaggctctttgagacttgagtaggtttctgctccttgcctcagaggcatcttaacaaaggtgactcctgacaccttcctgtaggctctttttgcgtgggggatctctttgaggggagctggttggagctccttcctggccttctctgatcatccaacacacactcaaccattcccatactgcctaggtgatgtcatgccctcccgtggcctcaaggggccatcgctagctgcctctgcccctacaagcttggcctctaccctggacggttcctctgagctcctcccctgtggtgtcctggtgtcagctcatcttatccactcggttgccatacaggccccacagcctcactgtctcccaagtgaaaatcagatctctatcctattcccttcccccaactgttacccgtggagtctctaattcctgaataaaagatctgtgcaagtaactgaggccagcaggcccctctgtctctccttcccagcccagactctctttgggcaaagctcattcctggctattatgcacaccaaacaccagtccttcaatttggggctggggcaaacagtttaactctccagtcttaggaggagaggtctcccttgtcgaagatgggagtggaggccagagaacggggagatgaaagtatatcccagccacgtaggaacatttctgctggtgcaagaaacctacatcaaagtggccacaagatgagctaatagaaggtggataaatatgagtccatgtttactgcactttatgtggaatcttgaccatgtagggagggaagggcctgcctgcgccattctcctgctcccacccctttttcccaagctgagcaggagcccccttgggtcttggggttgactttatagcatttgagattcttatctcttccttctagtcttttgaagtacatgatgacactctctccttcctctgccttttcctctggggaaatataagaaaggaataaagacttatttgtctggaaaaaaaccaagtccaacttttacaagtagagaataaactacaaacaacttcaatctgatggttgactttcactgacaagaaatttcctcctttcctctccatccccatctctccttccttccctctttttctaaacatctagcagcctccttaactgccctgtaggcatagccctggctaatacctgtgactggaggagctctcatccacccaaggtagacatcatttcaccatgccaggatgcaagctgtaggcgaggcctgaggctcaacagatcttggaatccccctctaaatgggtatggtctctgcagaattcaggctccccttctagtctattcttctgaggaccatctctttctatttttccgtcaacaccctctgcccctcctctgactccctctcccatcaccgctactcctccatcctctggctaccagtttttgcctcagtactaggtggctttttaccagactgaacccctcagggtccaggcctggctcaaagcaggtgctcaggacacaagtatgggccactggaagccctgtatcgtggggagggagcagggagtagggcttcaggaagtgtctgcaggagtgacttcatacaatccactacgattctgatattttaaaacaaataatatgtgtgactttttaaaatgtcatgtaaaaacacgatttaacttgtctttaaaatataccaggtatttaccaggttcgtacttgtgaacaaatattgtcttcatccaaacgttaagaatggctaaatgccatcatgttccctcctccaaagctaccctcttggaaaagacaaacttgtccaaagaggctgccttagtctagaacccaaaggacttgtcacctccataatttggagacacagcatgagcaagcttcgcctgccaccccacagccccgccccgagcctggcatactgggccattgcagattgggtggcaatactggcagacatctagttctaaaccttgagtttagaaacatgggcacttgcaaatggcatctctggtttctttctgtcctggaaacgatcatcgtctgttccctccaatgctcactgagcatttggtgcgtgccagcccccatacctgttacctaagactcagggaggaatataagctggtttctgccttctagagctcacgggctgtcaggtagacagaggaaaacccagtcaccaccacatgatgtgctcatgaagggactgagccacgtgcgttggcttggcagtccccagtagctcagaagggctgccatggggaggaagcattttcttccggtggtctttgagaaacaacctctctacactgacaccaagtacagcagcacctgcctgtgtcccttcacctgagtgaagtctttgtttgtctttgtttgttttaggtaaaattaattctttctcagttcagagtggcccctgattctgccatacaagtgtgtagtagataagttcacgttcagtgtcgctacgcctttctgattttgcagtctttatttccttctagctctcacctttacagacttaaaaatgctccactggaaacataggttgtttgctattggagttttttggcctctgacacccctttggctccttgcttgtgctcctcaggtttctctgggccttctggggggctggcttctccttcccacctgctttatagggaagacacattgctcttggctcaaggcaccacccagaagcagaaggaactctctcctgggcagcccagtgactggcacgggctcaacagcttgaaagctccccagccagaggaggtctggcacagattgaacgggcttgttgggaagtacttgggggcctcagaatggctgagtgggctgggcccacagcagcaggggctggcagggctggcttaagtgttaagaataactcttttctgttgttgtttttattagtgcttttttattacgaaagtaatacactgccataaaaattcaaagagtacagaaaggaataaagagaaaactcaaagcatcttcccagtcagcccacacaaacccacttcctagaggcagcagttatgatcagtttcatgtgaaacctttaatataatttttatacatatgcaaatgtaacaaatataagaatgcattttttgcaaattgcttttctttaaaggaaaaaagtatatgcccattttttaaaaagtcaaacactacagaaaacacaaaataaaacataaaaaataaaaacaaggaaaagacagctctcaaaatccatatcttagaagatagcaagtgttgacactctggaaggtgtttctcaaagcctttgggcaatttgacagaagtgaaatcacactatttacgctgccatgtaacttgctttgatgcaaactgctatttctctctttcattcaacaatatattattggcatttttcatgcccctaactagagatctaaaatcaacacctcgattggccacatagtatcctgttataactttggaatggatcttctgatagaaacttatcttgtaacgagttttttaaaatatcatgaataatgttgcaatgagcatacaggtacttagttatctccccctgatgcagttactacctgaggataaatgcctagatgcgagggtactggcaatacaaccccaaaccacactgagctgacactttctatccactgcattgagaaaatagaacacatctgacaacaccaagtgttggcaaggatatgtagcactgggaattgtttaggcaggaaagtcagtgttctgctgtcagattgaacatgcacataccctgtgacccagcaattctgccccaggatatattatatagatggttcatgacttaacaatggcccgacttacgatttttccactctaccatgatgtgaaagcgatacacattcagtggaaaccaaacttgaagtcccatacaactattctgtttttcactttcagtgcagtattcaataagttacatgagatattgaacactttattataacgtaggtttcatgttaaatgattttgcccaactataggctagtgtaagcattctgagcacatttaaggtaggccgggcaaagctatgatgtttggtaggttaagtgtattaaatgcattttctacttagggtattctgaacttatgatgcagttacatcccgataaactcactccacatctgggaatgttaaatgctgctgacatgtccagtaaaatgcaaactgaaaactgatcattggatttagcaacatagagggggttgatgaccttgacaagagccatttctgtgtagtgatgggagtgaaagagaagggaggaagaggactctgagaaagtgtagagaattctctgaaggattgttgatgtaaagggaagaaggggaatgaatggacagtagctagaaaggtgtatggggtcaagagaaaggttttttaaaatggtgggaagaattccagcatgtgtgcatgctgagcagaatgatccggtcaagagggaataattgatggtgcaggagaaagggcgaaatgttagcaagatgttcctgggtaggcaacaaatgggatttagggcacaagcagaaaacctgacctttcatctgcttcaggacacatcgttctcttgtatcaggatggggcagaatgtgtagataatggtgctgtggaggtaggggatgaagatgtttatatgcatctcatttaatataatatatatatgtactatttttgtatgtcagataataaaaagaattttaaaatgttagcattgttgagtccaagggatacctcatcattcattttgtggcatatttttagatcaccacccagaaggttgccctgacttatcctcccactctcagagcccctggggcagaagagtgcccattttcccacacgccaggtaccccagggttttgcagatttgttttaagttttacatacctgaggcaggggtggaaacagttgactttctttgcatttccttcatatgctaattggtgacccgcaaatcttcttttgtgattatctgttcacttccttggtcctttgctgattttcctactgggttgctttaaaaggagtccttttttattttcggaagattaagcctttcgctgtcatatgcagttcaaataactcttcctcatttgtcatttgtctaatgacagttatggtgggttttgccatacagaagtttttaatttctccatcttttatggtttctggttttcatgacatacttagaaaggctgtccccaccccaggattctttctcatacttttatggtttcattttttttacattaaatttctgagccatctggagtttattttggtgtggagagtgaggtaggaaatctagcttctttttccaaatggccagttattccaacatcatctcttgaatgatacacttttaatccacagattcaaaatgccaccttgatcacacactgcatttgaaactacactctatccctccgttcatcaatttggcagctgcttcctgtgtgcctactcaggcatcatactagcatgaggtgtgtttcctacatccaggaggaagggagaggagacacaggagacagcgaccctgcagggtaataagtgctagggtggaaggcggtggaagagacacttagctgggtcttggtggttagggatgacttcttgtgaaggcaatgacctctgaacagacatgagcatagtagcagttaaccagtgcgagggaccgcagtcagcactaagttctagagacagaatggaggcctatgttgggaatcagcaggaagtccagtatggcttccatatgacaggagcttagagcgtgaagaggctggagccatagcaggtactagacttggatggcagagggaatgaggagtctcagatggtgcccctgtttctagcctggactgctggacatggagtcaccttatcacccaagcagggcagaggggaagatggctctggctgctttgcagaaagtagatgcaggagtcaagcgcagaagccaggagactgggaaggaggtgatcggggacactactgtgtcccaggatagtggcagtggaagtggatggtttggagctgcaatcaggactggctgctggattggacatgggagacgagggaaagatcagttaaacacctaggccttgggaggtgcctttgatgatgaagaaaactgagggaggagaggtttggaaggtgaaggatggtggcacaagagtttgttttgaacatgtttcatttggattgactcagacattcatgtggtgatttcaagtaacaaaagtagcaatagtaaacattcactgagcaccaccatgtaacaaactccattccaagcactttatgcacgccatcccatgtcatctcacaacaacctatgaaggtagatgctggcactctcatctctattgtacaggtaagaaatggaaactcagagagggcaagtaacgtgcccaaggtcacacagctattaattggcacagctgggatttgcacgcagtccagttccagagtctgtgctcatagccttcatgcctccagataagtgggtgtcagggaagccaagagaagcaagtttttccagaaggggaaagtggagtgatcaactgtggccacggggtaagtgaaggcagaaatgtgaacactgggtttagcaacatggagatgactggtgacaagaatgatgtgaagggagtggtagggttgaagtcctgatccgggtgagtttatgagagaatgggaggagaaggagagacagtgagtctagacaactcttttgaggagttttgctcaatagcaaagtggagagatggggcagtaactagaggtgggagtgtggtcaggtgagattcttttttttttttttttatgttgatgggaaagctccaaatgaaacagacatttttatgatgtagaagagaaagggataattataaagagggaagagtctatgaaggggagaaggagtggaatccagaagtttatattggcaccattctgcacagttgcgtgacgtctgccagcatggttctttgccttggggcaagcatgaagaatatagacatttagctttgtccagatttgatgccattatcatcaggtggaggtgacaaagagacagtagggtgagaagattaggatgttcacaagacagcggttgagtaagctggatagggagggaaatgaagagaggaaaggactaatggatggatagaaagtggagcagccaacagttgggagcttgaaagatagttgtcacagaagtggttgaacgagcctgctggaaagagaggaggttggggcaagaagttggaaagcctgcattctctattctggaggaagcaacagcaggcaggctgcacctgtgggaagaagcggctgtggtggagctgacagggtcttgggagatgcctggggagcctgagggttggggatagctaagccacaagcatggatgctcaagtcacacactcactaccacacctcactgctctcaccctcaccctcccagtcactttctcacatccagggcaaagacctgcctgaatgtcaggtgggggatggtgttgccagttggcctgggcctcaaagcggggaggttttcatccaatggcaaactggactattctgaggtagctggggtgtgggagaaggaagagcctcctctggattgagctgccgggagggtgcctggcttcagtttaggaggaagtggatagctccctccaagaagggcagcatacggggtggtgcaatcctagaactttctgtgatgatggacatgtccactatctgtgctgtccaacacagtagccactggccacatggggctattgagtacttgaaatgtggccagtgtgactgaggagcagaatttcctattttattcctttgtaattcactgaaatttaaatagccacatgtggccagtggcacctgcagtaatcagtggatttctagagacatgtgctggttacaggttacagagctgcagtccccaaggcctgggatgggacaggtcagggaagaaggagaggaggaacagacggcacaatgccaggaaggctagagttatttggtcgagttcaaggtctccaagtacaggttacttgggccaaatgcaatcaacaggagccaaatgcatcccccagccaggctggtccaatcctttttgatgagagccagccccttcccccatgctgagaaaattagagttttcatcaagtgaggctctgaccagcaccagcgtgggcagaagaaggagaaaagcagcaggtctgactccaaaggtcggggaccacagtcctgctcagttgaacaaaggggcaccctctgagctgttctcccctctaatctccaaaggctgctctccatgaggaaatcaaggcagctaagcacccagggaggtttctgggaaaaactaataaagaagcatacaccctttaagaggtgaaacccagtaacctttcctctcctgtgtgaagaggacttggatttgcaatggtgttttagggatccactgcatttcctcttcccaggtgggcatttcccaagccaagggcagtgcccagccgaaaggaacatggctgggcatggtggcttatgcctgtaatcccaggcataagcactttggggggccaagtcagatgagttgattgagaccaggagttcaagatcagcctgagcaagacggtgaaacctcatctctacaaaaaattagccaggcatgacggtgcgtgcctgcagtcccagctactaggcaggctgagatgggaggattgcttgagcccaggatgttgaggctgcagcgtgccttaattgtgccactgcactccagcctgggtggcagactgaaaaaaaagaaagaaagacagaaagaaacaaatccgcaactctcagagccagacataccctctggttgatgtagtttcagctccctcagccagtggtttagccaggccaggcttagcagggccccagagtcggagctccctccctcgcaggacagatctagctgctcggaagttagcgttcacctgcagcctgcatctctctgccagacctcccagcctggggccccagagaggtctgggcggggggtgctcacagaccccaacactgactctgaccttcccatttcttgagcatgtggcagcttccacacctttcctcttccaggcgcacactcacaatgcccactgagcaccagccctgccagagggtcctaggagcctgggctgcttctggggcagcagcagggcccctggggggcggggttgggcccagctctgggggaggagctcccagctgaggccaggcagcctccagagtctccaggctgaggaccgcgggggccctcggcacggcccctagccggcagtggctgagctgagcttggggggatgagggggcgctgggcagggagcccactgtctccttctcatggcttcccttcctccttatcccaggagcctccctgccggccaactgtactaaaactccggaaaaccatggcggggaggttttccaattagaacattctttttccgacctgtggatgattcttaaagcagcaaaaagccattcttcagggcatgcagggagtatctgccagcgaggccttggctccactcgcgcactcgtgctcaggaggcctggcctggggctgcttcagagccacagacaaaaggcagagcctgtgttgtggggcatcaggtcacacagaccaagactgatggctgagagtttcctgggctcattcgaaccagtagattcaaacggcagtggggatccaggctacaggagtggcagatgtcagaccacctctctccttgctttgtgacaaggccactgctcccaatgagaccactgttcacacagcaaacaatccccaggcatggctgctgtcccttggagtagaactgggctgcctcctcccccaaactgggagccgcaacaggccgggacagggtctgactggtctctggccagggttggggtggcagtgcagtggggcaagtaagaatgtgtgtgtgttccagagagggggaccacaaccccgtagcttggagtgcaggctgagaacagggggagaggagcagccactccacatgctgagaggctggaccagctcctagcaggagagctggttacaaacacaagggcctggcctcacgggttcggggctcaaaggacccatcctacctgcaatcacacctggggacccctgcctccagggcatccaccctgcttggagtcagcagagtcacccagcaagtgtaaaccggttgaagagcttaagaggatgaggtggcagggcgggccccgggaaggaggggattagggatcaagcaggagcccagccctccccgcacatgaacctgagcaccccagcttctctccagctgggcaggggctccatccagagcagctggaaccccaggttctaagcccagctctgcctcagactagctgtgtaatcctggcaacatcttgtccctctgtgggcctctgttttcccatttgtacaactgaagtgttgaggttgcctgcctgtcttcagtcccctctagctgaggacactgcctgggggagctttgcggcctgacagctttcagggcccaacccctctttctccccctctagcctggtaactctttttgttttctgtattttttgtagagacggggtctcaccatatcgctcaggctggtcttgaactcctgagctcaagcggtcttctctccttggcctcccaaaatgctgggattacaggcgtgagccactgtgcccacctcctagcctgggaactctggggctagatcaccttgcttgagttctcttcccagccctggagatcagaatggggcctcccctggagctgaggagtgctgctggccagttctttcccagcagccacctgccgtgctacccatctcattgcttagatgcagcctcccagagacgctgcctccacggcctgcttgtgagctatggcttctccagcacagggctcaccacctgctactccctgcctctacctttcagcctcttgcctgcccagacagcccagcctggccccaccctgaagcccctacctctcacttagagccttgctgagggcctgcttgttggtgggaagagactgtccagtcccctggaggtggcactgctgcctaagctggagggacttcaggagaactctgccagagccagggggtgggagctggcctgtcttggagctgcggatgggtggaaaagtgcaagagatgtgaataggaaaggatagggccaagctcaggccaggtagggacagagcccagcctggaggcaggcagcagccaccacagccttggcctagaacttgagggaggtctaagggaaggttcatgaaggagataatgttactgctgagagaaagtggaggccacctggtgtccctggggaggaaatgtcattccaaacaaagggagcatcttgtgcagcgtcctggtggtatttgagcacttggtctatctgggtacatgtcatttgggcatgtctggtgcttgaagaggctgaagaagccagcaggtgcctgaagcctggctgaggtgactagaggtgccctggcaggcgtggaagtggaagactgttggggcaatggacaggtgggcagggcagggcagggcagttaccattcaagtcaaacccgtttgcaggcaagatcagctgcagggcctggcagcctggcagggagggaggggttcagggaaggctgatctctttggctggagcagtcgtgacagatcgggcctgggcagagactgagtcacctgggacatgggaagagcttgaggccctggggcggcccagcctggggcagtcctcacttgctggccgtgccgttggacaccacatttgctcatgctctccagctgggccccccacccctgactcagggctcttgaacaagtttgccttttccctcttccttgccctacatctcacccatcatgatgtcttctaccttctaccctttcaaactaggggctcttgaagaggactgggacccagacaaagagtatgacacagcctaagtcatacagtaaacatgtttaggaggtaagatgccaagccaaatccatggccaccagtagccacagtggaggaggggaggtgttagttgctggccaccagacaggggcatacaatattggaagcagaaaaatgcttgttggcaagagacggacatgaacagaagtgactttatatacaaccccctaagcacacacagggtcgccttctccctatctcatgaaccccaagaagaaaaggatgaggacagcttccacagcctcactcacccatccatcacttccttctgcaaattcttcggatgccctgtgctggtctccgtgacccagtgatgaatcagaaggggccctgccctcccagagctcaggatctagaacaatagagggtgacagccactatgctggattgatgtcatctgagggaactaaggggtgcacagaaggaagtgatcagctcgactgggtggcaggcaggggaggctttccggacactgggtggaggcttgaagaatgactaagagctcactagcccgacggggatgaagagcattttagggagtccgaggagcaggagcaaacaccccaaggtgagcgccatgtgatgtattcagaaggcaatggaaaaaggccagtgtggctgtaatgtattgaacaaagggaagagtggctggacctgcagggataggtcgtctcaaggagtctggcttttaccctgagagcaatgggaagccatggaggagttgcaagcaggagagcacctgatcatattgacacacgtgaacttttaacctgacctccgtgtagagactgagggaaaggaaggcaagaccagaggcagggggacaccagcaaggaggctggtcttcggggccaggtctggactagggtggtggcagcaggcacagggagaagtgggtggactggagggccatggaaacaccacattggcaggccttgatgaaggagaagcagctggtccattcttttgagcctaccaccctggtaggccaactcctggccaagtccatgccatttcttgggctggcttaattgtctccctgtttgggaggccgtggggtgaggggtctttcctccatgctctctccatccttagccccagcccagggccttgcacacaataaagcactcggtgagcaccaacgcgtgacacaggtacatcaaaccgcattggctctgggagtctggctgtatctcgtcgcccagcctgggagatagccccgtttgctgtgccttgtgagccccgggtccgtcccaggatggccttccacgatgagcggctccctcactcttctcctcctttcctgcctgcaggacttcctggatgatctcagccgccagccccccgcccccctccccgcccctgtctgggatctccatctgtaaaatggatctaggaacggtagttctcgactgaattaacccgacagcatctgtggaagtcgttggccctgtgccggggccagatcgcgcaactaggagcgggggcccttcacgtggcggaggcttcccggcctgggggccacgggcccggaggaatttgcctggaagttttccatcacggcagagccttctggagctcgccccgtgctcgacaaggggagccccagacttgatttctccagcagccccgcggggcggggccgagaaggggcgggcgggcggaggacgctggcgggagaatgtgcggaatgtgccaggcgcctctacctaccccaggaggggcagaggaaggggccggccgaggggaggggcgaggggcgaggctccgggcggccggagaaaacctgtttgttctcctgcgggcggagcccagtccgcgcctcctcgcctccctgcgcgctccccgctgtgcaccgcgccccgcgccccgcgcctgcctccccggcccggcccggcccggccgggcgccgtccacccgagggagcccgcgccctgcgactgcccgaccctccacccgccccacgagccgggcaccggtgccaggtagggctgtcgagtcgccattggatgcggccctgcttggaggcagtggggggcacccagtccgtgcccagctggggacaagtcagggcctcagtttccccatccataacccttaccagctccaagcatctctcttcgggttccccccgggagtcagtggatttctggttttcgctgtgagtgaaaagactgacaggcagaggaggccagcgtcccctacagaggcaagtgtcccccttgccagcctgatccctctgtcttgccctttaggaaagacacggtttaattgttagtaaacggcgaggggccaggatgctctgagagttgactgcaggcctttaagaatcagggaatctcatatccctccgtccccctgtgcccattttatagatgaggaaactgagacccagaggctggctcacccagaggatcccctcaatcgccctggggcctgtgaggtgcatgtgctgggtacagggcaatcttggggagggccatgaggatggtggctgctcacactcagacagaaggcgccgaatcaggtgtcactgggtgttatcgacaggatcggcactgcaccagctctgtggctggattgttttgatgggggcagagggagccaagagtctgtcctctttggaaaggcagagggataccttgccttacaaaaaggccgaaagctcaggtgctcctgcctgatctgccacttctgagctggggacacctgggtactctgtcggtttaagggggtgacacgtcaagctgcctcccacccagggctgctggggactcagataaagtaggtggtgggtgtgtcccggctttgggacatctgaggcatggtaggagttgtgttcttgctgagccgtcggcacgaagccttggcatcatgggaggccccaaagctgtgagccccgagagagggcctctcacaccccatccagcagtgcttgaggcttcagtacctggactaagtcctgccttggtctcatggcccttcagacttctggctgtcgtacctggctgggggcgggaggcaggggtgcacaggttgataggcctgaacagagctgcagaggtcctgccttcccagggcctccgctcctcatctgaaaaacaaggggcagctcagaggccagcaagtggccaagacacagatgcacagatgaggggccagccttctggcaggccttggtgcctccgctgttcccctcatcgctcccaggccacttcaggatgggaaggaacagatccctctcacctgcccctccttccagcaattcccagcccctggctggatgctgtgcattcagccgtgtggagctgatggaaggcactcagtgcagggccagacacgcagcaggtgctcaagatctgttcatttccatcctctggacactcatgactcaagcaacagaggtggcccaggaccacttaggatgttgcagctccgagtagcatgaaaacattaggggttcctcagtcctggagcagcgaggcacccctggctgggaagatcagggaaggcttcctggaggcgaagggcttggaagcaggaggaggagctcggcagccaccaggtcaaggcccgcacgtcctttggagctgctggagtctaacctccccgttactcctgaaagatcataaaccacttcttgctgagctcctgcatatgggggcccacagagaaatcagctccatgccttgccctgaggagtgacagagaggccatctgtcagtaagaagttgccatctgaatccaaatggcagcagtgcttgtccacctcacttcctgctcagctcaagtccagactccagaaaaagcctttcccacgtgaggccagtgatgccaggggcagccagcgcctcagctcagcctccctcagcctgacttgtgctccttgtcttcctgcccagtgtccccaaggcctcctgagatctggcagggcagggactctgggtccctagcactgggcccaggacctggccacgataggcatcggcacttgttccctgaactgtcttcagttgcatgccaagcaaactcccccaattctggctcggtgcattctggaagccagaagcctgccttcctccttccctactcaagcttccacaggtgactgccccctttggtgcgggttttgcttcaagccacaacttataaggtgccaggtcacatgtaacacaagctttccttctgttgctgagccctgaggctgcccccactgccagtccctggcggcatgggacaggaccagtgccagagaggagagctgctctccagtgcggcaaccccttgcagtccgggcctttgggctctcatgtttagggtcagtccagggactttgcattcgttaccactgtgcccatagtgaaccggctgatgccaagacaagggcagtgccatcaggggaccagtccctgagagatgctcaggagaggttgccatcattgcttccaaaggccgggaagaggaggaggggctgaactgtcccacacctggtcaggtgtgtggcaggtgagggtggcaccttcatagcctagtggttaagagaatggctcagaggtcagcctgggttcaaaccccagctcagccaccatccagttgtgcaaagttcggcccttcatgcaaccccttgaggcctctgttttctcaccagtactgaagggtggctaaagccaggagcacctgctgcactgggtgcctgcaagtgctaggttcctggcacagaggtgctctgtcacggaaggtagctgagccaggactatggtgccctccttcagggctgtggtggcaaggagtgaagtgggactaggtggagagagagatgctgactgggatgtgggcccctacctgaggaaaacagtttagaaattactgctgatgatgcaaacagtatctacccacatttaaagtgactcactaaagaacacttaattcttagggtgatttctcatgcctactaaagtctgactcgctttcttttttgttttcactttttttttttttttttgttagagctggggtctcgccttgtcacccaggctggtgtacagtggctagtcacaggcatgatcatagcacaccgcagcctccaactcctgggctcaagcgatcctcgtgcctcagcctcccgagtagctggcactacaggcgagtgccaccatgccagcactgttgttactttttatctttaattttttttttttttaccttgaattgatttaaaactcatagaaaagttgtacgaatcgtgcagagaactcctgaagccttatctgaattcccgctattaacattttgccacatttctcattagctttcttcacttgtagcctttggatgggtcagagggtgggcagggctgttgtcagttcatttttccaaagggaaactgaggcacagagagggacttgctcaagtgccattgattagaaactgagccagattaacttctctcagggacacatattgatgcatttggcaggtgttttcttgatcactttctgtgttgggcgctggggcacagaaatgactgagaactgacagcaaagtgggagggacaggtctgagtggagaagagactggaaaaggaaaagacaagaggccctgtgggtatcactctcaatgtcggaggtggaatgcaggaaggaatctgcagcttaagcgtgtctcccagggaatttgactgccgaagggtcccagaggccactttcagaaacacggtctaggcttttcctgttgggagtgtgctcatttctcacctcaaaagggagctaggaactgggagggtgcctgcctggagcagggaggtgggtccaggccagccaagagagcaattcctcacccactcattaacgcccgctgagccatccctcttcccgcagagctgcccttggggctgctgctgctgagatggcggcagagctctgaagccacgccctgggtcagagaggagacatagcctctggggccagtgggcaagccctaggctgctggtggttgctggcggtggtccctggccttggccccatctgtaggcccagctcgggcacccagtccgggccccttggtctagtccctgtgatctttggctcagcacgccactttgtgatgactaggtcagtttcccagagagcttgatgtggcgaagagttgctatggagagagcaagcacaaggattttaatcacaagaaccggcatccctggtgaaaatgcttacatcaggcagtgcctgctttaaactgaaataaaaataaaaataaaaataaaacccaaaaccccaaaccaggacttgcttcaccacttgtgccagcgatcccttactcatgctttcattcctttgggcctgagcctgggcacctccttgggaaatgcagtgctctggcaacattccgctaggccgatccccccagcacccagcctggcggttagggctctgaaaatgcttgttgcatacatggcagtgtgatcctgggcaagtgctttcttctctctggacttccttattcttatccaaaaataggggcagtgttagaggtaagggtggggttgaggggactctgggtctagagtgggcagaaagatgagaaagagggttgtgggaggggagaaggaggatagggagtcagagctttgggggaagtggggaggcagcgggctctttctgttccttttgctcctaactagtgatcacctgcatctaggacagaaggaattagctttggctgatgttagtcaagggcaagaaggagtgacttcctgtcactggcctgctctggcaaagactgaatggatggcagcagtggtgtgtgtgtaggcgggggtgttcctaggggagagcgaaagagggtaaaagaaagtggccgagtgcggtggctcacgcctgtaatcccagcactttgggaggctgaggtgggtggatcacttgaggtcaggagttcgagaccagcctggccaacatggtgaaaccccgtctctatcaaaaatacaaaaattagccaggtgtggtggcaggcgtctgtaatcccggccactagggaggctgaggcaggagaattgcttgaacctgggaggtggaggttgcagtgagccaagactatgccactgctactccagcctgggtgacagagcgagactcgtctcaaaaaaaaaaaaaaaaaaaaaaaaaaagaaaaggaaaaaaaagaaagaaagaaagtagggggagagggagaggtgctgtggagattggagtgtgggctccatgacctctgagcctcctctgatctcactggctgccttgtctgcaaatgggactagcatctctgcatgactgggattggctgaagaccacattggttccctggctgcagagacaactgcaggatgaggggtacagaagcagccagggccctacaagagggtccctgcccagccctctgttctccacagagacatctccaagggcccttgaagccaagccagccctgaaatggcccagttccctgaacggtcgcttgtatctggctctctgagaacgagaaaatgggcgcatgaaagccaggaggaatcccgaggccccaaggagcggtgggtggcccagctgccttctcccctcctcctcacccccagcgccccaccaccttgggaaggagctggcctgccttaaaagtctgcctcccagggcccctccagtgcagacgccgagaagtctagatgctggggtgttaggggtgggatggggagaggtgaaattccagactttcatgcagaagtcatttacctgtaaagcacatttacaaataccacccccgccatgcgttctttttccatattatattttcccctctgcaactcaagtctttttcagctctttttttttccacttgctgagcctttttcctgccaccctgttggcctccaggcgagagcccctgggactggagcatcccaggcaggtcgtgcactctggctctggcaagaggggcccagcctaggcctcctgggagctgcacgctgagcagcagactaggaggctcagacgggatccagctgctcagccctgcccacggtccctaaatcaccgttgaagtgccccatccccctggatctcagcaactcctggaacagcagctacagccgctgcagcggtgcctgtggcggtgcctgctccatccccttcccagaggaaagcaacctgtctgctgactgttgccttgccagctgctgagactccagtgcaggagactgggaatcagaatgtcctgattcaccagacctggccacaggaggctgcttcatcaaatggaacgtttcatcattccaacccttttggtccagaaaatcagcacccgcaccggcttaaatcagcctgggtccaaactgagtcagccaagtgcgtgccttgagaaaggacggggtgagggcatctgagtgggggtggaggtggtgcttcctgactttataattcctcaggcttgtccttgcacttcccatggcagcctccagggggagtctgtgccacagccaaggctctccccactgcgctaggcttttgaccttagccccctccccgggaagtatcattgcttggggtcctgtggccttggtgatgaccggaggggctgcactgaagcctacaccttcctcacatgaccaggtgcaggggccagggagcattttgagaatggggcttccttaagcccattccccctcccatgggcacagagcattctcttttacctcaaagtttagaagtgaaggtcagggagggtgagtgacgcgtccagtgactaaaacccaggtccttggactcctcgtcagtactccttcctttgctccagagttggaagagccagcatggatgtgtggctttgtggccttgaccaagccctccacatctctgacggcaccgctgtgcccgtctcatgacatgacagatgataaggcatggctggctctgcgccggggcctcctgaacatgtcatgcccctactaccctctcagcatctgtttctgctgccccatctggctcagggctgcagtctggccgcagagagggaagctctctaaggaaggagaatgggctgggagaagccacctgctgccccttgtttagcaggctgcattccctagcaagccagctctgactatctcagtgtcgcccttctcctggtcacccagaccgccctgttcctggggcagctcatgacactgcgaggggtttgtgaagggtctttcgtgggagggcccttactcagagctcacaggcatttgctcgaaagacagcaaaagaggacctaagacatggggacttttctttgagtctttttcctgacactaggtccagtggaggctctttgcccaaatggaacatttacagtgagaaatggacaggagcctcgacacccccaccctatgcagaatttgacctccacccctattttaccaaggcaagccctccagcaaatgaagctgtcagacaggcttggggggggggcggggtcacagcctgggagggaactgcctccctctcaccccttggtgctggtgctggtggtccccaggttgagttggaccagaatggaggggtggagggactcccctccaggggactcccctcccctccagggactcccctccagagtccctcccctccagggactcccctccaggggagctacctgggctggctgggctctggggcttgggcagcctggagccttgggtttgtaaagcccaactctggctcttgtaggaggactggggggaaaggtgtagcagctggggtcacccttgcacatgtgtttttccatggtttggtcattgccacccttatcgagtggtagggaacccagacaccatgaggggagaaaggatttgcccagggcagcaaagctgggatgagtctccttcccagagaccagccatcttctctgagggttccagcaggcatgagccccagcaggtatctaagctgagggatcagcactgcctgggtccgcccatctctaggagcaagttcttgggagacaagggagttatcccttcaccacttacctcatgaccagatgggagtacttatgtttctgctggagtgatgggggcaggcctatgtgctggtccccagctatattctgggcctctgcctccattaaagctccttgtcccagagccacgtgaaagtgcttgcagacagagctttcctgaaacacagccagaggtttcctaaaacatagcaatcagcctctgcagtgggcagcccaagtcttgatggcttcatccacttgtacttgacagatccatatttggtccctgtacttgactgcaggggcagcactctgggctgtgtcccccttcttgccctgtccagctgtttctttatgctgactcctgacccaccccaaaggggtccacacagatctgagctgtgagtgatccctgtgagcctagctgaggttggcacacgtggggtggcagagctgggtgtctgctcagctcctggatgcaaagcatcccaattcacctttgggaaagaagcccttctgcttgcacctctgcctgtggcacacctgctcctgcttgtgcatggcgcccagtgcccagcacacatgcactgagacaagccctgacacctgtgccctctggctgcatctcatccatgagcagcgatattcagtgctccgggaaggcaaggctgaaggcgttttgctcccttgccctcccagtttgcttaggaggccctgcctggcgtcctacttcccttctgcacagtttgggagccatcctaatcccctgcgagccagcttctctgggaggtgccgccctcggggagtcaggcagcggggaagttctacaaaactttctctgagttagtcctctcatcttggaggctgagcacgtcctgtggtgtgagagggagtcttttctcctgccgctcccgtctgtgtccatctcctcacgctccagcacctgcgtcattgcctgctgccgcccccgctcctccagcgcacgggaatctgcatgcatcagccccctgcgtcagctcccctctcactccactcgctgatgacaccaggcttgctgtggtcgggataacaggctctgttcagccacctcattggctcctcgctcctatctatccaatcagggccaggggccccttccttcgaggttgctgggcaaccttcagaggccacagaggcagggagaaaggtagagcaggaacatgcccatgggcatttggaggccatctgaattcagggaaggcctgtcctcatctcccccgcccagccctgccagggacacttcctcagattgccatctctcagcccacttggccagagacaggaagagggagaaagaaggggatgaagggcgggccggggcatctgcctggtgtctgaggtggcctggcctgtgcaagaggagttggacttggccctgaactgccctgggacaggctggtgttgcctgagtacggggctttgctcagagtcagcacagagaggggtactgtggagtgtggccacatcttgtggggcttcgggggtgcaccacgagggacagttcatgcagagggtgtcagaaaagccaaccattcctttggtggcccaggccaggtcctaagcaggatgatatggagatttccaaaaaaccagaagtcttctccaaatcaaggtagaaatgagggccatggtactgaaaaggcctagagtggctgtcctgaccagaaatgtgcccacacaggccatcaagacacccgtgtcatggcatgagagatccagagaggcacatgttctagcttggtgtatcctgtcaggaagagacccagtgagcaggcccacagatgccaccttacagatgaggagacctagactcggagagtgggatgtcacagccatgtgaggccacttagggaagaggagcagagatgtaagcacaggccacagcccatggggacagtgtttgcttttgggttgtgtggcctctctgggtgtcagggctaatggactttgaaagaagcctgagttcgcagaggaagaggaagactggaagacttgggcaggtagcaagcccctggcaccactttcaaaggtggctaaggaaggaacatttgctctccatcttcttggcagggtaaatgggaaggtgcagggaaccccagttacagcagtttctttttcttcaggaactttttctgagtctttctcaggcacaagcccagaggcatgagagagcttgacatactggactcagatggagagtgagagtgtagggctgcgggagtgggtggcctgctccgtggggtcctggagtcacatgtggcaggcctctgtggctgcatcaggccgagcagcacaggcaggcacggtgcagctgggtgagtctgaagtgtctcctccctccagcgggtgagcattgctgctggggcccagcggtttggaggaagccatagaggcgactggcagtgggtgtgccccaggagcactcgaggccgtcgtgcatgggcttacctgggccactgcgtggctgggactcagagccctgggagtgtggccagggccagacacgggcccactcctggctgactctgctgaaggggaagcaggagcattggcacagctcttgtgcgtgggctgcacacggtactgctggccttctgagacctgatcccaggagtgtgcatgcagggtgcccgcctgacacaggggtggtgctccagcaagggaagccagtgttgttattgcttcccagaggacggcatggttctcatcgcagagcggagcccaggccactgtcccagtggttgggtcttctggccgctttgctgggacctgggtgcagccctggggagggctggagtcctgcacacaggctctggaggcttcactggcttcccaaatggggttcacatccgctaatgactgccccggagagcggagagctgagggtggccctggggcagcagccatggtggccagagggtttatctgccaggcctctgtggtgggtgctctctccctgggtagactgggcctttccccccaccccctgctgccacccatatgaaagcagacataggcatcgcatgtccacacctgagccataaccggtccctgtaccaggctcttcagatattctggacgtgagcctcgtgagcagggagttgtccttgccccctggagtactttgctttctgtggaggtccctctggctgacttgccatgggctggggagccagggcgggattgcgtggggtgggagaggagccatcagtgggcctcatgtgccctcctgtcccgtcatctcttccctgggccccgtacatgtgtgaacggagaagccggcctcctgcttccaggggtgccaccgccactgccactgccgctgcagcaacctctgtttggcatccggcccgaaacaccccagcctgctctccgtttccttctccaccccagcttgtgggaaaagacgaaggaggccccgggaagaggcccaggctgcagcactgcgtggcccaaagcagtgcacagcacagctgggccccagaggctgagggcctgcccttgctgctgtggggatttcctcctcggagtgagcaagcaagagaagtccctgcatctgttcattctcctcacctcccatccttcctaggcactgcttgcctggcatcaactctttttttttttttttttttttgagatggagtctcactctgctgcccaggctggagtgtagtgatgcgatctcagctcactgcaacctccgcctcccaggttcaagcaattttcctacctcagcctcccaagtagctggtattacaggcacatgccaccatgcctggttaatttttgtatttttagtagagatggagtttccccatgtcggctaggctggtcttgaactcctgacctcaggtgatccacccaccttggcctcccacaatgctgggattacaggcatgagccaccacgtccggccctggtatcaactcttgagactaatcccttggctgctcaagcatactccactcgcacttcatttgggtaaaccaccgtcgggctcatctttagcacacagaagatacacgttcatgacaggaaaattagaaatacacaaaggagcaaaatattttggtgtatatctttacagattttttcccctgtgcatttttatgtaaatatattttgacttagatgacaccatcatacacatcctgctttacgggctgcttttcactgagtgatgtatagaaactgtacacaatacaggtttataaagcatgttaaatactacatgtctcagtatgatttgtaatagctgcatagtatttgcttgaatggatagattacaatatgtttaaatatgattgatgggcatgtagattattgccacattttcacccccatactcaacactgtgatgacacctgtttcatatacatctttgctgtactcgtgcaatttcttcctcaggctacttggctgcgaggggaattactggaccagcaggcctgcccttaagccttttgatacatacagaaactcattctgtcgagattcctggtttcccttcccacaagagccaccaggaagccacctctggaggggtccacattccatccttcaaggctgcttacatccgtagcaagggtcttcctggctgtcactgagtggagggccactctgccctgctctctgtgaagggctggacaaggggaggggacggtggatctgggaggagacctgggtccgagcaggggtaggtggcttcaggcaatcactccctggtggggtgtgctgggctgtcacagggtgcctgggcttggtccttgctgaggttgggggaggagcagggcttgcctgggaagacttggatctgcaggtctgtgcctggctgtgggagttaggggaggggagcacccagtaggagcagggctggcctcgacgtgccgggccctgagggagaagcagggcttagctcggcggaagttggaagggcatttcaggtgggcggaccagtataagctaaggcacaggcattcacttggcagggctaccttccagggactccaaggcacatggtctgcttggagcacagtgtcggcattggggggaaagaggctggctcaggggactggtgattttgctcccagtcttagaaacagtgtggaaccatcaggtgctgactgagaattgaaggctgatgtgggccaagtgggattagagaccaatgagtgttgcctggaggaggtgcagataaaggcagcaggccagggaccagggaggaggtctcaagggatcgtggcctagaccagggcaaattggagggagaagtcagctctgtagatgggatgtacattccaacctcatttgcccaccccacccaccccaccccgccccatcccatcccatcccatcccatcccatcccatcccatccctcccatcccaccccactacatctcatcccatcccatccatcccatcccatcccatcccatcccatcccatcacatccatcccatcccatcccatcccatccatctcatcccatcccatcccatcccatccatcccatcccattccatccatccatcccatcccatccatcccatcccatcccattccatccatccatcccatccatcccatcccatcccattcatcccatcccatcccatccatcccatctgatccgtccatcccatcccatccatcccatcccatccatcccatctatcccatctgatccgtctatcccatcccatccatcccatccatcccacccatcccatcccaccccatcccactgcctgacactcatcactttaaaggctccttgtcccaaagaactgccttacacttcatcgtgtggaaagactctactttggcagagatttttctgactctttcatatttattgtctcatcaaaaaagaaatttcacttgtgagactcagccaggcgtgagggaaaggagcccatgcagaagcaccagccctggtctttgtctggcaataaacccggagtcttctgactggagtctcagctataaagacgggactgaaggcagcatggtgccctctgcaggggacggatggtgttcccacccagccctgccctcctttgccatgggtccctctgcctctgtcattctgcatgtgcaaaagtgtctgtcttgactttggaagtggcttatttggtcctgatttggcaggaaacttctaggcaatgtggccatcaggtttgacaaggggtaactgatgagtccttgtgcctggtactgggcctgggatggagtccacccccgaaactgtggatgaccgtcacctgcttgccacgctcatatgtggaagctggtggctacagtccctgaggccttagaaaggagtacgtctttgaggtgcccagcgcaaaataagtcatactagctagtacagcctagcaaggttagaaggaacctaaagacgaaagactaggaggtcctcctgcaggtgaaaagctgaggcccagatgaagtgaggaactgtcccaaggtctgtagtcagtcagtggcacccagagactctgcacatgtgccctgcccatggggccactccacaggttgctgggatggggacagttaggcctgtatggccctaggaacacctgtggagtgagcgccactcaacagaactctaacgtggcagctttggtgcagggctgggcacgcggggctcccatttgcagtgatgaggtgccattcctggcacacagcaggctcgggctgtctgggctgctcgttcagtgcagtttatggaagagccagctcttgctgatgtggcaaatttggtttgctctcgtccccctgccctgcccatttgagtgtgcccctgacctccacagaaacacatccaggccctgccagctggcagcagtgctgagctggtcagaccctagccctggaggggcccaggggatgaaaggccctggagagaaaggctcttctgctttgtgactatgccagcacaaccagggccctgcttcctgtcatgcccacaagcctgagcccccagcccctattttgaggcccaagggttcggctgtggccactcagggctccctgcagctctgggtcgctcccagcctggagagccagcttcatcaccctgggcccttctccggagcaaatggccctcgagaccaccacagctcacccctcatgggcacgagagggcagcactgggctcaagggcagagaggctgaaggcagtgtggcaccgtctgggcagcatgagcagcaccgggctcaggggtagagcagggcgagaagacacagaggaagaggaagcagagctcaaggcagctgtgggccagggcgtaaggaagcctaacttaccacattgccacactcgcctgttccctgagggccactaggatttggcagtggggccctgggctttccccactgaaggtggagccaacccccgaaggaaacagggctgcacaccccagaccattcttggcgctgtttgaggaccaccgcgcctctcctagcagatgacttgagagctactgctgcttggctccttttcaggtggtgccgggtacttataggagcatcggcgcattccatcctcacagcagtcctgaaaggtagaattttttttttaactatcattttacaaatgatgaaactgaggcagctcggagaggttagctgacctgcccaaggtctgtcagaaaactcctaaggggtgagaagcaaggtccaaccccaaagcagctggtcccccagcccgtccctctccacaggccatctgcctgccctgaagctgttcggctttggatgcactctctcccaccctctgagtccaccagtgccagctgtcttccccacaccccccagcctgagccaggctgttagcactctgtaggagggctcatgttctcccgttatcagtgatcgctttgaacagacagtccctggcagcccctgagctccacattctctaggtgagcagccctgggcaggcaggtgggtgtgccgctgggcagcagcaggtacagtgagtgctggccccctggcttctgcccatacttagcactccaccaacgcttgccacccccgatgtgcagagggcagtctggatgatcttggtgtaccaggacccatatggtcacctgcaagacactacaaatgcatgaagtgacagcatttgcttacctttatccccagaagccctgctgaatcaagtgagaggagagctgcggagcaatcaccatgagtatctcagctcttggaggccgcaccaaaggtgaggcctgggctccctggtttcccaggctctgtttggggctgtttgcttccaagcctgcccctacaggccacaagcactgtcccagcagcaaagggagagcagcatactgggagaactggaaaggaggtcgagggtcctggggctgcattcctcttctgaggcggttggcttttcccaccacagggaagcctctgccaccaggcgaggaggagcgcaataacgttctcaagcagatgaaagtgcgaaccacgctgaagggggacaagagctggattaccaagcaggatgaatcggagggtcgcaccatgtaaggcaaggaggcggggagggaccgcagcaacgtgggggcgcgcaatccgtgggggaccgaccatacctggggatgcgaaggggcttccaccattcagagctccgccaggccatgtggagggcagagcgtgggaaaggctatccagcaatgtcacagggtgggagagcccctgggtgcctgggaaggagaatgtgtggcagaaatggcaggacttgctgggcagcctctaggatggaggccacaggatggcaggtgacagggagtctcggagccaatccttcaggatgcctctttcccccagagagctgccctcaggccggagtcgcgccacatccttttcatcagctggggaggttccgaagcctaggtaagaggtggtgctcaggtggctggtgggtcagccccagggactctcctgcagcttggggccagccctcaacagggaggggtgggcagtccacaggggacagggatgcagccccagccaagggtctgcaatgagtaatttgaaatctgcaggaaggaggggcttctccactgcaccttccttttgggaaggggagtgtaggagtcacttggtccaggcccttggcctggctgtgtggctgtggggcagctgacttccctgctgggcctccgtggctccagctgttaactgggattgaaattgtctttaagaagaagacgacctcccacccattccctgcagggagtgatactgcctctgagatgctttgggcagcttccagagtcacagtgactcactcctgcaggtcaccctgactgcttgagtgtacttgggactcagcatgcctgtagagaggcacgagtttgctctgactgtctcccaagtttaccgtgacatattttgtcagctgaccaaggagaactggcttctctctcttttgggggcttttccataacagtgtctaggggggctctgaagcgtgggcacaccctgctggcctctggaggaactgctcctgacagagaaagggaactgaaattcaggctcgctccttgctccaaacagccggcaggcggcttctcagggggtggtagaggcagtggcggcctctggaagggagggcctcaagtttacagccagcacacagggctacctttagtaactacggtctctctgtcacccctcgatgactcagcgcccactacctgccaggtcccatgctgggcacagaggatgcaggagtggtcaagacaaaggccctgtctttgggcaactgacgtcccagcaggggactcaggcaggaccctagtaaacagttcaatacaaaagcgagaacccccaagtgtgcctgcaacatggccacctctgggaggctgtcccctgttagagatggagattgtggggttggagactaccggaggctctgtgttgcccttgacccaaaccccgatgctccagcccacatcccctccactgcaggacagaagggtctaccctgaccccttgactcctcccctaactctgaggaggactctttgcaggggcccctaactcctgcccggaggccagaacttccaggctgaccacccctggctgtcagctccctgcccgctcgtcttggctgccccctgagttatctgagccccctcagttgctgccaagcaggaggtcccaagcacccagagcctaatgtttcccagccgctgaacaaggcctggccgcgccctctcgtctcaaacttccaccaagacttggggtgtgggcatgcaaggagctggagcaaagagggccccgagggacaggaagggggacagctggcttcggctggctgctgcctgggctctccccttcaagccctcatgcaccttcctggtggaggctgttgagggagatcaggtcagaccccgggctgaggggaagcctctggctctgactggggagcctccagcttgcactggttcagccccaagcacagaggatgggagggctgtcagctgagagcagtgctccgtcggcgcagcactgggaactggctggccaaggagaagctggactttggagaggccatcaagctgccttcctaggcacctgccatgaggagtcacctggggcacttttcctgggggagcatgagggaaataggcagagcatagcgggcacctgatcaggggcacagggggctggcacccctcgtttctgctgtactgggacacctggagcacttgccagccaatcttatttgctatcgttaagggcaggataaagtaggatgacctcagccctccagcaagcctcgcttcactccaccccttcttctcttcggcaggcctccgagcacaagggctcccactggctacatcatccggtaagtgaccgcaggactctgccggccttcctgtgcccactcacgccaagccctgacttcttacccctccagtccctccagggagctcaccggcatctcctgggctctctttcaggggagtgttcaccaagcccatagacagctcttcccagccccagcagcagttccccaaggccaacgggactccaaaaaggtatgtccatggggtgttggccagtcggccagtggggaggtgtgagggcctggtctgggctcctggcagagacagtgctctgcctatcaggactgtggggccttggaggtgccagctttcatcctgggtagggcaggaccctggagagcagggtggggtgaccagaggagatgggctggggtgggactggcagtcccaagtggatgtgtgggtctctgggaggtcctgggccactaacagtgtccttgtcctggggtcagtcctgactaggcctggctaatgggacagagaggtgcaggagtttgggaggggctgggtgtagagtccccctagcctggcagtgggcacccttgacttgacttgctgatggcattgagaaggctgaagttgcatgcaattcaagcaccttggcatcaggcattgcctgggactccgtcagactggaaaggccaaggggacccggaaacaggaagcaaagacacaggcaagagcccgctgggctgttccctgaagctcggtggggtttgcctacacagctgctctgagtggcgcagttccgggtgtctgtcagggccaaaagcaaagaggaaaggctcccaggcagctcctggtccacctctcatgtgtccactgggctgtgtggccaaatctggaggcaggagggagcctgcaggtagacacatggaaccttctcctctctagtgctgccagtctggtgagaacagctaacgctggtcctccccgcccctcctcctctggctacaagatgaccactgaggattacaagaagctgtgagtatgcaacgccaggctcagcgtggttccctcctccaaggaacaagtccaaactctgggtccactgaaggcagctgactacttgccaccgagcacagcccgggaagtcccgcctgcctgacactccctgccagttgcagctgtggcctggagcccaccagagggtaacaagccccagaaaactggatggctgtgcacattgcacgtctgatccgaggcagagcggagaccgcaggaagcttgtaggaggggccccacggatctggggaaagggtcatgggtcgtgaggctgctgctggctggctgtgcttcctgggcttggccctgcacccggccgagcctcaggtgctctgcctggctgcactgggctgggggcctggggatcctcagggtgctgctgtcagtctgagcattgtgtgcctaaatctgagctgcttcttggatagaaaccttcgggttttcccttagtgctccccttggggtccctttcaaagccccccaccccccactgcatgctcagggaggagggttctctggacagaggtgtgaattgtgtctctagttcccaggggaccacatctttccgttgtttgtcccttgcctccatcatccagggttggggagctgctgggtaacctttctggggaaggggagaggctcgaacagggagggaggggagagctggtctcagggaggaacaagtggcatgacctaaggcccaaaggcagagatattgacttgcctcgtcattgttgttgaaagccaggaagccaagctgctgagggtggcagcctatgacaggaaagcgcctctcccctctcttagggcaccctacaatatcaggcgcagctctacatcaggggacaccgaggaggaggaggaggaggaggtggtgccattctcctcagatgaacagaaacggaggtaatggaatggtgccttttgggcatcccggggggcagggcaggagcctgagtcttcgaagactgctggaatgaattgtactggttggggtgacaaaatgcacaacacgtaggccatcagcggtagcccacggagcatgagaataggtgtcattctctgagtgccagaaccacccactcagtgttggaccagctgaggggcccttgagaaccttctgtggggtagaacctaggtaatgtgggtccggggaaaagcctcctcatgtggaggctcttcagggctctaaatcggtttgttagaaagggccctgagacagttgaacaaaaatattcagggagaagccacctgcacagtgccctctatctgcatgatctgcatgccttgggggttctgaatgccccggaccccaaactgagctccaggcatgcacagcagtgggagtgtgccccatgctgctgaaattctaccctagtctctgcgccaagctgccctcgtccacacaggccagcaaagttccatggacccttgcccctcctcagtcctctgtccatggggactgaccacataccacccagtgctggtgaactatgacaggaagggtttgttaagcaccttttgtatgcctttggcttggggcctgtacagcagttgggccctgaggaaataaagccctcccctccctgggctcagccagccaccaggtccatatctgctgacccatctgtggcgcaggaatcacagcaaagccccattgccaaaggccctggcagattggctatcctcagggaacagttcacagtggcaggggcccccaggcctgggtggagcaaggaaaagagccagaagctaggagctgcctagcattgaatgccagctctgccacctgctaggtgagtgctcttgggcaaataatgaaagcttcttggactcagtttcctcatctgtaaatcacagaggatactagcgtctactttcctggattgagaagagcaataagccaatgcgaggatgttggcatctggcgcagagccgggcacatgccacatgctccataaacatgggctgcccttccttcaggttctacatttcctttgaatagtccttggagcaggtgcaaatctggtttctctcaccccttgcctccctggggtggccctaagtcaccccgagtccatcccaggctaggctggcagagcatgtccagcttggcacccatcagatgctcccccatcccgtgtcaccccaggtcagaggctgcaagcggtgttctgaggaggacagctccccgggagcactcctacgtcctgtcagcggccaagaagagcactgggtgagttgccaccaactggctccaggctctaggacagctctcctctcctcagagctccagccttctctggctgatgaaagggtgggtggagagatcacccccaagggccttcctagctgagccttctcagattctcagatgtactttctagaaaatggagaggtctggcggctaccaccagggacagtgaagtgccgggaatggagagggcccaggaccctctgaggtagagcggtcttgatgtcacctgcccacgggctctgcccaaagcattgcctttctgcttcctttccagcagtcctacccaggagacacaggcaccgtttatcgcgaagaggtaagtgtcatcaagggacaccttggaggcctgttactggccacaggaaggccttccgtcagcaggggtgtagtgtgggagctgtggagaggggatgtggatgtgggggactactgtccctgagcagggggagttgtgaggggctgggggcttctgtctggaggcctggcaagcacctgggtggctgtggtagcatatgtggtcaagctcttccatttgccaatggctaatggggctgggcccctgacccaacgtggagcatttccaaggccctctgggagttgttcccctgcccctgttgcttgcctgatgccttgccttctgctctcatccaggatcaaaacctgggccatcaggagaacttcccctgggaggtgactgtgacattggagatgggccctaaagggtgaacagggcttaacagggaatgatcagaacgtcgggatactccagctgaatgagggaggggtgtcaccattagttgagacagggcaccttctggaggaggaaaatattcgggggaaagcaagaaagaaacttctggaaacttgaatttgagggacttccagttgagtggacagggaaggcctctctctgtgctgaggtggctagctggggactgcaaacccaagagaagacagcatgccaactgccccaggcagagggccccagtgcacaggcccggggtgggactagcttgctgtgttggaagaccaggaagttggcaggaatacagagagcagggatggtggcagcacaaaggaagtgacagagaacggggggcggtgggggggtcttcctggctgcatttggttcctgtggtttctgtaacgcagtaccaaaaactgagtggcttaaaacatcagaaagggattctctcccggttctggagaccagaagtctagatcaaggtgttagcagggtgggttccttctggaggctttgagggagaaaccatcccaggccactctcctggcttctgctggtggttggtgatccttggtgttcctcggcttgtacctgcatcactccagtctgtgcgtctgtcttcacatggccttctcttctctgtgtgtctgtgtccagatttccctcttcttacaaggacagcggtcattggatttaggacccatcctactccagtatgacctcatcttacctgattacatctgcaaagaccctatttccaaataaggttacagtcacaggttccaggggacatgaattttggggggacactattcaacccagtatgctgtccttatcctgagctggagtcactgaacccccagcctgggccacctcttggccgtgatcctgaagggttgggtcagttagacgccactggaagcatgttctttgaggcctccaagctctagggcagccaagaagaccacgagcgctgtttctcttcttgctcaaagggtggaggtggtggaagaggacgggccttctgagaagagccaggacccacctgctctggcaagatccactcctggctcaaacaggtaatccattgcgctcatctctgcctggggctggtggctgccatacctgccactcagtcactgaggaacctcagtcagggcacctccatgctgggcttcgagatcagtgtccccatgtgcccagtgacaagacgggacaaagaaatcagtaagagcccatctggctggatgtcccagggctgaaaggagcaaaacagtccagccccccgggagagagcacctggctctggtctgatgagtacgtatctgtgtcaccttaacccttgcaccactgagcctggtggcaacttgaacaccccaagaaaaagtaccatccttggggtttgagagggccagccaccatggcagtagcatgccattgtcagacttgctccttgcactccaataagttagccacattcagcatgcccagggaggaggctctgacatctccagagcctctcacagccaccttctttgccagtgcggatggaggcaggaccaaagcgtctcgggcaatttggatcgagtgcctgccaagtatgcctagccccgctgggagccaggagctcaggtgggtgccgagagctgactctggcttgtgagtgggtgtgatggcttcccgccagcctggctggctggttctgccagctggggagggtctggcagtggggtgatggggcaaggacaggctgagcactggtgatctcactccaggaagggccgtgatttgtcttgatttctgatccctgagaatctgggcagataatggtgctctcttgtctgtggacaactaataccttcttgtactttgtgcagaatggtgctaagtcctgcagggagagccaccacctgctgttgctgctgtttaaagtgcctgcctggattgagacctttgctcaaatctaggtctcctaagagctgcatctctgtagcacccttggaagacccctgcatccagaaggggagagggcctgtccctaccggtcacttcccaggcccccaagggctgttcaggctctcctaataccatagcaatcccccaatttgagctccacagccatttatagacaggtgaccactgtcctcagggttacttcctcagtctgggagggagacagaaatgctggcagagggagccaggagcatgaggccagctccctccatggccccaggcagcagactgccagggtgcttctccttttcactctctccctctcttgatcttctctggttgtctgactctccccataagaactttggtccatagaagatgtggaaaggaagatttgagaattctttacaaggcaatatctagggcagagctccccagtctttttggcaccagggattggtttcgtgaaagacactttttccacgggacggagcaggggatggtttcaggatgaaactgttccaccttagatcatcaagcaccggattctcataaggagcgcacaatctagatctctcacatgtgcagttcacaatacggttcgcgctctcatgagaatctgctgatctgacaggaggcggagctaaggcagtaatgatctctagcttacctcctactgtgcagcctgattcccagcagaccacagactggtactgatcctcaggctggggttggggacccctgatctaggggacttggcaattgagggatatgggggcaaaggctgccacaacaaagtattgtaccacaccctggggcgcttaaaccacagaaacgtatcatctcccacttctggaggctagaagtgtgagatcaaggtgacggcaaggttggttcctcttgagtctctctccttggctggtagactccatcttctccctgggcccttatatgctcatccctgtctgtgtgtgcctgcgtcctaatcacttctgtttttttgagacagagtctcactccgtcgcccaggctggagtgcagtggcacagtcaccactcactgcagcctcgaccttccaggctcaagagagcctccagccttagcctcctgagtagctggggctacagtcacaggccaccatacccagctagttttttttttttaaatttttgtagagacagggtttcaccatgttgcccaggctggtctggaactctaggactcaaatgatcctcctgccttagcctcccaaagtgctgggattgcaggcatgagccaccgcgcccagaccctaatcacttcttataaggacattggtccaactggattagggcccaccctaacaactgtattttaacttagtcacttctttaaaggccccatctccaaatgcagtaacattctgaggtcatgggggagttaagacctcaacatatgaattttgggtggcacaagtcagcccataacagtatacagttctcatttctccttatttctcttttaaagaaaggcaataaatggtttcaggtgcctttctgtttgttcgtttgtttgttttgtttgtttttgagatggagtctcgctctgtcgcccaggctctgtcgagtacagtggtgtgatctcggctcaccgcagcctccgcctcccgggttcaagcgattcttctgcctcagcctcccgagtagctgggattacaggtgcacgcgaccacgcccggctaatttttgtatttttagtagagacgggtttcaccatattggccaggctggtctcaaactgctgaccttgtgatctgcccacctcaggctcccaaagtgctgggattacaggcgtgagccaccgcgcttggcctcaggtgccttttagaagataatataggaggctgggcatggtggctcatgcccgtaatcccagcactttgggaggccaaggcaggaggatggcttgaagccaggagtttgagaccaacctaggtaacatagcaagaccccatctctacaaaaaaataaaaaataaaaattaaaaattagttgggagcattgatgtacacctgtagtcccagctacttgggaggctgaggtgggaggactgcctgagcccaggagtttgaggctgcaatgagctgtgaccgcacccttacactctagcctgggtgacagagcaagaccctgtctctaaaacaagaaaaaaaagagagaaagaatggaggagaattagattgtgctgtattatagatttaaaaggcactttgacatttattccacaaaattcctttcgatgtttaatccccatcatatggttgtcattgcaaggtggctttttaagtttgctcaggttgccataacaaataaaggctagagattcagggtccggggcaagctcccaacaggaggctcagcttgatgcttctgatagttctttcctccaattctggtcactcaatatttggagctcacccaggcagcttccaggaaagctgctggctgatcctgaccctggagggccgtcttctctgaccctaccacgttaggtgctgcactggaccaagcagccaccatcagtactcccaggcccagctcctatctgcctggtgtctgagaagcccagcccgtgaggaacaatgactcaatcaaactcagggtcctgcagcacttcagaaaaggctggtttgtggcagagtggaagaggagaatgtcacagccttgtccccaggcacagacctatcgaggctaccctctccccaccccctgccctgccctgtttcccttagctacagtgcaaaggtcagctcctcataactcttgccccccttgcaacctgaacccagtttagggaccctctcttggagaaactggttctacacatgcaccccttctcggcccccaggcctggctgctttacccgaagcactggtcaagcttgcctcacctgaccagggcatggcctcctgggtcccggtcctaggctctgcccagcatgctgcctggcagagcgtctggggagcagggagtaggagcacagcttctggcacaggacaaaaccctggctttgcatcagactgactgtgtgaccttgagcaagtctcttcatctctccatgcatcagtttccccgtggataaaatagggagagcagtaatagctacttcccaaggctgtcccaaatgctaaatgagatcgtgcacctgaagtacttaccacagtgcctgggtgctggtatcctcgggggctcccagtcataggcgtgctgagctgcagggcccttattcaaatacaggaagagatcaatatctccacctgctggcatttgagggaaatgtggccaaaggcagtgaaaaggaggtatcccctcgccccacatccccgcctcctcgctctttggcagaatgagtcacacactgtttggcacaggccacagttggtcgcattcccacaggtggctgtgatcagttttgggcttcaggcttcagcagatgcctgcctctcttccttgggtgccttccaagggtgtgcagccttccagcgtggtcctggacttcagcttggactggagctgtctgtggttgagagtctggggagatggtagggtagcgggttgtgggggaggagagacccttgtattagtttactggagctgctgtaacaaggtaccagaaactgagtggcttaaaaccacacgcatttatcctctcacaattctggaggctggaagtctgagatcaaggtgtcggaagggccatgctccctccaaaggctctgggggaaaatctgttccatacctttctcttaccttttgttgcctgcaatccttggtgtttcctggcttgcgcccgcctcactcccatctcggcctctgtcttcgcgcagccgtcttccctctgtgtctgcccacattgccctagtctgacatcagtcactggagcaggctggggtgacactttgttcccatttcctctgtgacagagccagaaacgccagtgagaaaatatgttgtgcttgcctgtgacatccctgttccctggcaccacctgatttaaatgaggcagccaggggttttatactgtcatcataaatgacatcatcctcaacaacgatgtcatcgtcgttatcacgagaggagatggggagaagtcagagctgtctgtgtgtctagggcccctcctggctttcatgatgggagaggccttgtccttggtagcccttccatttccctctggtcactttgagcactccaggccctggccagggtggaagtggagggacagagatgagcagcccgctgacccagccctccatggctcattccttgctttcaccttggccactccatcccctacccctcctgggacccctgagtggcctctttaaagtgccagtctgaacctataaaccccccacctccacttcaagcccatcctgcatcttccctttgccataccagatctagtctgtacattcaggacccctgccagcctctacctcctcctcctcccccgatctcccttcagctggcctgggtcgggctatgcctccatgaagcttgtccactgctcccatggctaaacctgttctgggccctgcagcacagcaaggtcagtttccatgcctctctgcccctgcctgaccctgctgggcccagagcttcaccagggcaggcctggggctcaggcttgtctgcacttccagggcccagggacaaaggcaggagtgactgcaatgtggcttggaattaggctttgctccatggacctaaggaggtctggtttggggtgaagggtccacccccagaaagcctgggagctctatattctctctggccctggccacaccatggccaagcctgctgggcgtcatgccttgcagtacggccagagaatgcatcagacttggagggatgtgtgtccggggtggcctgtggtcatctgggggagggctctgagcgtggctggcaagaggaaagctcaaaggggccctttgtcctcatccccgagtctgcgacatcccctcccactggttttcattccatatttggtctgtgggttttctcagtctctcgtacccctcagtccccaccagtccatgaatgcagaactacccctggcctcacaaatggccactttggataccctggtggggtcacaggctgcggttgcccctgcaaatggttggtagaagcacgggttgggaggtttcatttctacccagaagggcccttgctgtgcctgagggagggctgggctcaggtcaggggtgggagaccggggaaggggcctacaggtcagtggcccgagctcagctgcagcaccaacaaggctcaaggccaaggaggagatgagagcacatcaaaagggggcagtgggtctgggcggcccaccgcactcaccagcccaagaagggggagacttttctcacctgcaacccactgggtctctcctttggcccgcagctcaagaggtgaggaaattgtccgcctgcagatcctgacacccagggcaggactccgcctggtggccccagacgtggaaggcatgaggtatgggggtcctgctgctgtcctggctccctggacaccattctagagatggaagcagcagcctcaggtggcaaatgatgaggcctagggccggctctgccactgtagggccaacaggttgatgggaggcatggtcgacctgggttttctgccccatctcattctttcactcagaaaaccattatggagcaagcgcttagtctgtgtaagggcacaggcccgaccctgggacacagtagtgaacaggaccccctggctggaattgccatctgcctggtgggggaggcagacgccgacatgagcatgaatgaggtcagccagagatgctgtgtgccaggagcccctgggaagtgacagctcaaccctgccaattgctgaagatgggaccagtcagccgtgctggggatgttggtgggggtgggaggaggattgggtctaaggagcccgtgaaggccactgaggccattgccctgcctgtgtgagagggccactgggaatagagtggggtcactgggtcagagtccacagctctccatgccactaggctctgtgctggggaggggtgggtcaaggaggccacaaccagcagggagcacgaggggctcagcctctgccctggggtgggggtcagacagccaggtgacatgcaggcaggattcgggggctggggtggaggctaggagagatccgagcagggagactgggcccctaccttgtgaaggccagggactggggagagaagcgggagtgtacactgaaggtcatcccttaatccctggggtggcaggaacttcgagcagaggcctctcaacagtgtggtgggtgggagtgcttggggagggcttcctggaggaattgacatccaagatgagtcctgagcgatctctaggtccctttaccctcctccttggctcctcccactttaattctgcccccaaggcaccaagtcctgtccactttattttagagatgtttccatccctattgctctgcccctggcccaggcctccactgctactcacccagttgtctgcgaccgtttcctactgtcccatccctggactcccttccacatctacctgggtgatgtttccaaagggcagaagtagttatgccagccccctgcagaaagccctgcaaagcccctcccactatgctctgcagcctgaactcagtacctggccccacctgcaggctcctccctccctgggcctttctctgtgcaggctggaggctctgcctgagatgccctttcccctcttcatctttctgttccacctcaaatgtcctgtcttctgggtcatgtccttctcctgagtttcttccccaggcagcatctgagggcttgtcgattctgcatggcagcatccattctgcatggatgtagatacaatcactatgcccattttacagattaagaaactgagaccctgaatggttaagtaacttgctcaaggtcacatggtccagagcaggcagatccgctcagcctgccctactcccaccttccaccttctgcaccatagctcattgtactagttggggcagggagcagggggacagagaggggtgatggaaagacttggcatttgctgagtgaactcatttgacgagtttattcgtaggcattgaagtcaaaatttccaggagggaggtattttaaggtttgtgattgaggtttgagagagtgattagggctcaagagatttccacgttatatgcagacagaatagagctgaaatcatgagcgtaaactagctttacatggggctcatggtgagccaatggaagctgggcaccgacctcagtatgcaggtggcagccacctggccagccctcctggggacagctgggcgagggcagtctcttctcgccatgttgagagtgggcctcctgagggccagttgggagttagtgggtgtgcaggccagtataaaggagaggcaggaacaagtggagatccctgcttcaagggtggcagttgacaccttgggaggggaggagacagcccagcaagtggtggagcacgccaaagggaggagaaaaaggcggagaccaggaaggtgtgtggccagggaggtaggcaggtggtgttgacaggatcaagggaggaggggtggtgagaaggctggagtggcccactgggtcagcagtactgaatggtggtttgaaataatgatgggactgtctctcctggatttgacaacatggggctccctgaggacctgaaggagaacagaagggggcttaaattaggagattaggatcagggatatagtccagaactcaaatcccagctactcctcttattacctgtgaaatttggggcaaatcacaggggctttgtgtgcctccgtttgctcatctgaaagatgggcatgggtgataacagtgcccatatcctggggttgatttgcagagttaatgcatataaagtcacgagaacaggctcaaatgctcaatcaacagtagctattgccaggcacagtggctcacacctgtaatcccagcacagtagctataaaacaacaacaacaaaaaacaaaaaacagtagctattagtaatgaagttttgataattggccaatctgtcaatcagcagggtttgtttgtttttggttctgttttttaagacagcatcttgctgtgtgtgcccaggctcaagtgcagtggtgccatcacagctcgctgcagcctcaaccttccaggttcaacctcccaagtagctgggaccacaggcacacaccaccactcctgactaactttcaaaaatatttttgtggagatggagtctagctgtgtttctcaggctggtcttgaactcctggctcaagtgatcctcttgcctcggcctctcaaaatgctgggttataggcgtgagccactgcacccggcccagtagcaggttttaagctccgtggagacagctggcgtttgaggatgaggtaacagcccacacctgagtgtgaatggctgctgcatggttaacttccatttctttcctccataggtcttccccaggcaacaaagacaaggaggccccctgctccagagagctccagagggacttggctggtgaggaggctttcagggcccccaacacagatgctgcaaggtaactcagtgcaggaagcagacacttcattcccagaacacggagcccacatacacccagctgaaggacttccatggcctccggtgcaatgtcaatggatgcagctggggccaggaaggtcctgttcccactgttcccccagtacctggggtactgcaggtctttaatgaacatctgttgaaagaaagaaagaatgaatgaatgaggcctggagggaggtaggcccctgccatgattcctcagggagccagttagagagcaggaccaaactccagggcaggctatccccagctcctggcctgtgctgagttccttccattcccctgaagcttccacactcactgtgcttttactgcaggacaaagcagccctgccaatggccagggcaaagcaaggccaccaagctggcagtctgggagagtcagtgaccaaagtatgtgggcccccatagagcatgtagcggagactttcaggatgacccgtggactaagggagacattgtggcaaggggtgaggggtccaggacgggaagttggagccatagcggtggatgatgagtccagatgggatgattgtccccagtcgctgcacagccagcccactgacctgtcctccaagccagaccagtgccaaatgtgtctggtgagcagtggctgcaggctgggcatttcttcagtgagaacctggtagccagttacagctaagaacccacacacccgtcttctcagtgtggatccctggagcccctagctggaaccctgagccctggaaatgaggaaaggaatccctctatggcttattaccagacccacatgtcttgccccttgctctgttggcaatcagctccccccaccaccaacgaactaacctcctcctgactttccaccttgctcccaaccaacccatcaggtttggaaaaaatacagaaatacttcctgttagagtcaacttgggcttggctcagctctggtcagagcagcacagagtagcagccaaaggcctgtgcttctggtcttgaggcccactctcatggcatctgggttagatgagatcaaaacgcaactagagtcagcaaatactccacttctcataacaggtcaagtgcacagttgagtgatggcaatgtgggatccggagccacgggctcccggcctgaaggcttggctgcagtagacatcggctccgagagaggaaggtgagctgcccgggggaggcaggttctctcatgcccctggtgacagaccagggtcaagctgccaggctgcttgggctgctatgggtggggcactggtcacttcctatggctcctgtctactgcttctcccacactcccacattccaccacatcctgtgtccttgggctttccactttttggaatcttgttcatttttctgatccctgccactggccctcaagctcctccagagtaggcactaggcccactcacagctggaggcccagccctcacatggtgctggtcttgggctggtcaaatgaacgtgtagggaatacatgaagggacaaattaatgagtgaatgactgaatgatggaagagtcggcaccttcttacttcttggttaagctctgaggaccagctaggaggccctttgctcctgctttctcccttctctccttttcctgccccatccctaccccaggcagctctgctctgaggttcagggagaggaaaagcggtagccctggagagaccagcgtgtccagctgggctctggcttcttggacctggagggagtcaggggccactttctcaggtgatttgcagagtggcaaggtccctcttgtccctaagtggttccaaaccaagcctgaatcattcttggggcaaaggctaggtatgcagatgttggcataaatagtttagctccaaactatgctagagtccttctggttcagagcagatggctagggaggagtggcaaagccagtgtctgcaaagagctacaaccgcaagatatcatctgcctcctgcatcctactgcagtctggccaaggagggaatcctgtggggaaggccctgctgatgctttcctacttccctcagcacacccagggcccctttccctcactaacttcaatagtttgcaattcatgccatggaaccagagcccgaattctaaatccaggcccacaagtcaacacaggaaggggacagcaggtcctggcctctgaaaccactgtctccgagcaggtccaaggagaggccaccagagactctgttctttaagctgccactaatggggaggactccgctagagccctgtccatgcagcctgcatctttttgccatctgcagaggcattggagggatctttttaaaaataagctagatcacatttctcccctgctaaaaccttctagtggctctccattttccttagaatgaagtccaaaccctttcccatggcccactgggtcctgcatggcagaatctttggccttctatccagtcggggctcctgctactctccccacagtggtgcagcttgactggctctgctgatggctgtcgcggaagagacttctggtctactgtgattgggtggctctggtctcctccatgtcaccccgcctgcttatacaccctcataacatgaagcctgtgctgtccactgtttccttaaaatgaaaccaagcctcaaagttacttgtaaagtcatctgaagaatcttctagattttcatgaattttaacccagtcttttacagttgtcttacctatatagtagtccctaggtatctgtgggggattggttccagaacctcactcatataccaaaatccatgcatgttgaagtccctgatataaaatggtgtagcatttgcatgtaacctatgcacatcctcctgtaccctttaaagcatctctagattattataatacctcatacaatgtaagtggtatgtaaatagttgttatactgtattgtttagggaatgatgacagaaaaaagcctgtacatggtcagtacagatgcagccatcctattttaattatttttcccacatctcatctcatcctctcctctcctctcctctcctttttcagacaggaccttgctctgtcaccagggctggagtgcagtgctgtgatcacagctcacagcagcctcaacctctggggctcaagggatcctcccacatcagcctcccaagtagctgggactacaggcgtggaccaccacgcctggctaacttttgtatttttggtagagacgaggttttaccaggttgcccaggctggtttggaactcctgggctcaagcagtccaccgacctcagcctcccaaagtgctgggattacaggcatgagccactgtacctggtcccaaatattttcaatctgaagttggttgaatccacagatgtggaacccacaacatagagggctgaccacacttagtttgactataattttcaacaaactcctttattgtttttcctttttttttttttttgagacggactcttgctctgtcccccaggctggagtgcactggtgcgatctcggctcactgcaagctccgcctcctgagttcatgccattgtcctgcctcagcctcccaagtagctgggactacaggcgcccgccaccacgcccggctaattttttgtattttttagtagagacggggtttcaccgtgttagccaggatggtctcgatctcctgaactcgtgatccacccgcctcagcctcccaaagtgctgggattacaggcgtgagccatcgcgtcctgccttgtttttccaaaggaaaggttgtttctcatggcaacaaccactctccttttccattcattttcatggatttacttaatcatcgaacttagtgattcttctccattagtggcagctcaaagaactgagttgctgccccaggggcctttccttggatctgctcagagacattggtttcagaggccagggtctgctgtccccttcttgtgcaaatacaactggcataaagaggtctgggaccaaacaagagcacctcttagtgagtgtgctggttagtggagggcacaggcttgtataggcagtgattgttcagcatgccgtgagcatcagtctgcctggtttacagagacacagagaatgtgactccaccctgagaaggttgggtaagacattccccactaaatccatattgagtgggtgaatacaggtggactgggaaggtgcactgcttctataaacagccactgggccctgtggtaacaggaacacattagcacatgttatggcccaggcattattcaaagtacttggcatctatgaactcatttacttttctcagaatacttacgagacagacatgattagcatccctatttcattgatggtaaaactgaggcccagaaaaaaaggtcaggtaacatgcccaatgtcacacagctgggagatagcaaagccatgatttgcaacgccagagggcaaccactatgccacagagccccaggtgtcaggctgccttgagatataaatattgttcctcaagcatccatttgagcagcttcttggtcctcatcatctgtggggggcaggatccactttctcgggagagggtagacatacagacacaaagtcctgaacctggaccaggtctggccttctttcacaggctgtgtgcagctgctagctttgcctctttcctggaagaccaggatgggcacagtgccaactctcagtcctgcaagcctagaccagcagccatcaggtaaggttagggccactgccctagtgccctatcccattgccagacacagcctttggggcccagcctcagctgcagcaccccaggatccccctcgaacttctcagctccatgccactttcacatcaggtgatcacagcaagacagggaactccagggggagctctgaccaggggcagtggaagaagagggatgggtgatatgtctgctcacccagagagcccagcaccaacctacatggacccaagctgaggtggcagagaggagggcatctgaaggcagagcctgggaagagatcctgctaggaggtctcagagaacctctgctgtagggactacagccaggtttagcaagcaggagtcagggagaagattcccaggggcagccagcattagagggctcagttcccaggagcacaggaccggtggctgggatgggcaaaaatggctcctggggcacaaaggtacaatgggaagaagctgtgcattcccatgctgtaagcgtctgccctgtttcacccaccaatccaccagtgggcatggccactttgctgtgggtgtgtggagcatttggcaagtcctagtaaggaacgatctttcttaactcccataaaccctacagaggtgtaggtcaggtaaggatacgtcatgctcagggtcaggttccagccgcagctgagggctaaggggaatgggtggacgtggggcagggagctggaagaacactcgagagatagcaggtaaatgagacatggctttactcagcagcagctctcttacacagctttctcaaactagctttctcattagcagcttactctcacaccgtctgccctgtcttggctgcttagtccggtggcccctacgcacagctgcgtggccagctctcccttgccttcagggtcagcagcttaattctttctctccctgggcacgggcaagccaagctgtgtcctggctcccctctgtcctggctcccctctgtccacctgcaaagacagacagctcttgctctctctctttctctaggttcccgtgcacccgccatgtcaagctatgttgagctgagccaagccccaagagacatgtcccccatacacagcgtcaacagggcagttataccttttacagacaatagtggtttagagccaagtatgaacttacataaacaggttatataagaagtggaggtgtgcacctgtgcaccagactcattgagtcatgcaggcctggatatccccctctgcctattccttgaacaaagcacatccaggtaccttacaggatactagaacccaaaaccaggagacttccccagggaacccaagttggtcaggggcagtgtttgctcttgaactcaggtgctaaggccatgtccaaagctgacatgaggttgtcacacacagtggcatcggtgccacactaatgccaggactgagacaccagcctttactggaagacacagttcctccctttctggtgagaaggcagcctggagggggaagacctgggccccagccttctttggtctgagatctcagcaggcctgtgtttccttcctcagctccagtgccacttcagtctctgctgtccctgctgataggaagagcaacagcacagcagcccaggaggatgcaaaggcagacccaaaggggtaaggcatgagcagacagtgctgaacttctggggtggagagaggcagcttgggctgtgtgtccattggcctttggctgggaaggtgaggccagcaaggtttgtgagctggcctgaggcacatagcaagggcagaagccccaaccagaaccctctggcttctggggccagggagctttccactaaactgttgccttggccaggaaatacatcatagtcagaaagggtctttcagtcagcaaccactctgacagcaactgccttttgctggaggctggagcatgcagacaaatcagaaacacctctgccctccaggaactctcaggcagggggtgggcaaaggctggtccagattagagcaatacatgagcgctagagcaggggaagggggcttcatggggactgtatgtagctggatgtggtcagcgatgagtgtccttgttggggagtgctggaagaggaggctcagtgaactaggtagggcttgattggcctcttgtactgtgatattggagtccactgtgtgcacagccctctactcacagtgtctcatacggttctcctcacagtctctcaaaggtttatgcctaattacaacaaaacccaaaagcctggagcctaggtctctgtgcctcctgggaaggatagtgctccgaagaaaacagccgcagctgagatagagtgatggcagtgaggagggtactacttaggtgggtggaaaaggcaactcaggcgatctcctctaaagaggagaaggagccaactctagaaagaacacggtggagagagctatagataaggaaccacaaaccaactaaccctgaggtgggaacatgcttagcatgttccaaaggacagagtggctggagcttggccagtgaggagggccacagatggagcagggccttggtaagccatggttaagagattggatcttatttcaagttttaagccaaaggggagtctcatgtgatttaggtgtttaaaaggtgaatgcatgtttgcattttcataccacattgctgttgcttttttacttaaaccaagatgctgggggctggggtgggcaatggatatctaaggtatgaggccttattgtgtttcttttctcattcgaattgcactgacaattaacaatcagagtgaaaacaacagctgacaccaatactgtgctgtgctaggtgccttacagccttcccagcaacttgtgagatgggtaaggtgggaaactgaagcatagaaagattaagtgacttagccaaggccttacaagtggcagaactgagttccaagggaagaggctctaagaaaatcctcaggagaaactacgaaaaactagtttatgaaatcttgtctttggagcctagtctcaagacccagaatcagtaacttacagctggttaacatggttaacatgctgtgtgatctcaccttaattttccccaaacgtggaaaaggataaggcttcttattatgcaacttgacagaggagaaaattgagggactcactcctgtaatgaacacacttaggaacagagcccagatccagccaactctagagccaggctcacgctactttcctctgatgtttaaacgtctgcaaaatcagaggtgttttttttttttttttttttttttgagacagagttttgctttgtcgccccagctggggtgcagtggcgcaatctcgactcactgcaacctctgcctcctgggttcaaacgattctcctgcctcagcctcctaagtagctgggattacaggcacatgccaccacgcccagctaatttttatatttttactagggatagggtttcactgtgttggccaggctggtctcaaactcctgacatcaagccatccacccatcttggcctcccaaattgctgggattacaggcgtgagccactgtgcctggccaatacaaactttcttgattacagtgtttcacaactctggctgtacttgagaatcacctaggaagtactgaaatacactgttgatgaaaaaggccatactctgtaaaatatttgaagaaattctgagccaaatgttaggactatgacccgtgacacagcctcaggaggtcctgagagcatgtgcccagggtggttcacttacagcttggttttttatgttctagggagacataagacatcaatcaatacatgtgaggtatacattagttaggtccagaaaggcctaggtatacattagttaggtccagaaaggccggacacctcaaagctgggagtgtggtgggggtgggggtgggggtggggttccaggtcataggtggattcagagattttctgattggcaattggttgaaagagttgttattctctaaagacctggaatcaatagaaaggagtgcctgggttaagataaggggttgtggagaccagagttcttatataggtgaagtctcataagtggccgcccttagaagcaatagatggccaatgtttcttattcagacctttaaaaggtgctagactctcagatcagaaaaagtcctggaaagggaaggagattctctacagaatgtaaatttcccccaggagagacagctttgccaggtcatttcaaaatatgtcaaaaaatatattttggtgtaaaatacttcaatttctttcattacctgctgtctgtcatgtgatgctatactagagtcaggttggaatttggcatattattgcttcaaggagtctgttttgtcagtctgaatatctctctcaatgttaatactggtcagttgggcatgaattccaaagggaggagaatatattgaggcatgtctgaccttcccctttctcatcatgacctgaactagtttttcacgttgtgtccccttggctgagagaagtgtccattcattcagctggggagcttagaattttatttttggtttacaacacaacaaaaacttcccgaagtcccaggtagagatttggattttatttttctggggtgggtctccatcatgtgtctttttcaaagctccccagtttgttctccttccaggctaggtcgagaaccatcgttctcaggtagtggttctgacccaggggcatctcccaaagcttccagcctgctacgatacaatgtctggagccatttttggttgtcaaaactgggagtgggagacactactggcttcttatatgcagagatctgggatgctgccccacatcccccaacacacaccatagaattatggggttcaaaatggtaatagtgctaaggttgacaaaccttgctgtagagccttgacgatctatttgggaagacagcagggacggaaaagaaaaagggatggcacagaaccacacccctcaccttccccgaaatctgggtagcgggcacaggacgtgtgcgcctgcgcgaatgcgcgctcgccaccagcgtacgcgacgcgtgcgcgcctgtgcacctcggcgagcacgcgcccgtagtgagtacgcctgcgtaggccgccatttcttgaagccccgaactcggtcgcagtgcccgccgggaaaatgcgaccgtccacaaagtgaaatggccgcccgggacgagctcggcctcggcggggattctcttgaggccatgcccgtgccggccgccagaggtcgcccgaggatcacgaatgggcccgaggagctggctgccccttcccccgcgtaaggtctgaagccgcggccagagtggctttggggtgaccgcgcgtggaccgtcgccggcgggaggaagcgcggtcccgcgaggggccgaacggggcccctgcggcttgagcttgtttcgcagggagccctggggccatggcctctgggacactggacacgggtcgtcagggctgcccagggggagggggtgtggacgtgcagacagggaaggcagctggaccctccaaccacgctgggccctcgggctgaccggggctggtctgtggggcagtgaggaggggcttcgttccctaggagtttgatgagggagcgccatgggggtggcgtcatcctgacatcccgcagggcagtggagccttactttccctaggttacaacacagttttaactgtcccaaactgtggggactccgccctattccatcttgggccgctccatcacactacagggagaggcggtatagtatagtggttgagagcctggactctggtgctttgggttccagtccaagctctgtcacttacaagcaccgtgaccttgggcatgttactcatcttctctgtgcctcaggttcctcacgtgcggaatagtggtaatcatacctcctaccatatagggttgttgaaatggccaaatcggtttgtatatgtaaagcctgtaggacatttaaacctgcgagctaagtgaagcagcaccagaggaatatctcctcctctcagaggtgttcagggacacctggaaagctaacttaaccagctttattggtttgatttcatttgacatgacacgatatctcatcttcttcctactaaacttttgtcatcaaattttccatctagaacatgctgttttcctcattatgttgcaagcatgggcttctcgtttatattttttctgcatgaggatcaggtgaagtttaggcaccacatttcctcaccactggcaaccgttgttggccagtggaggcagtacaagggtggaagtgtcagctgggtgcagtggctcatacccacctgtaatcctatactttgagaggccgaggcgggaagaccacttgagttccggggattgagatcagcgtgggcaacgtagtgagacctcatctctacaaatattatctatatctatatatgtatatgtatatgtatatcatatatatgatgtatatctcatatatatatgtttttgaaacaatgtttcacttctgtcgccccagactggagtgcaatggggtgatctcggcttactgcaacctctacctcctgggctcaagtgattctcctgccttaacctcccaagtagctgggactacaggcacacaccactgcacctggcttatttttgtagagaggagtttttgccatgttgcgcaggctggtctcaaactcctgacctcaactgatccacccacttctgcctgccaaagtactgaaattacaggcgtgaaccactacgccgggactacaatttccgttttttaaaagaatggaagtgtgtagattatggttgtgttaggagttgacagtggctgtattaggctactggatctttggtccaattacactcagaaggaaaggcttcagagaaattaatccaaaatccaaaatcccgttggtcaccatcccctatgttaccttgcctatctctaaccacttgacttccaggaagttcatgaggagctcggacaggatagctgggaagtaattcccctggatgttacattgtccagcagagcttcctgtgagtgtttgcctaagatttcctttttatgacccacataggtcatatgtcctaaaatcacagtggccctgccacaggcctaggaaagaagaagccttgttcatccatttgtccctgtgtcacaatagagcccaaatttctctttgtggataatcctggctctatccacagacttggtgagggcaacctctactagtgtatttctacagaggacgtgggacaggacgggactctgattaaatccatagtaaagctaactcagggctaccacagtagggagacaagctcttcaggccttgtatgtttgtctttggctcaagcaagcatgtcactgacagagattgaatgggtgtgtcagggcaccctgctggcaaccctgggactggtgttacctgtgcagaccacttttggatctgcatgggctgcagcagaccctaagggtggaagcagcacagagaagcacaggcccagtgggatggttccccacagttactgtgtggcgtcacactcacttgcctgcagttctgcctggtgcagctggaggtggcaattagcttgttgtgcctgctggagaattttagttcccttgacctccacctgaggctgaagaatcatgttgctttcagggcatactttccaaaaagtgtggcctctgttggccttgttattccagcttgaaggcaggaagcctgcctagacaaagttaactcctatatacaaagagtcccagggtagtttgtagcgtgttcttgtctcggggtagcccccaccagctattgaaggtaggctggtgatgttgggaaggttatattcagagtgagctaggatcgaggtgatggcgaagtagattttcattctgaaatgctgggctcactctcttagtagcccaacttggtgtttgcccctggcctagtagactctggaagcagtaccttgcacctcggtgtggggctggtgatgggaggggtgtggaagtggaggatcagctagcagcctctttcccacggtacccagattggagggtgcagtgcaatcatggggtgaggccagggaggacccctgaagagctcgatgcctgagacatctgggggaagccctgtccttcttgctggattcaggggtggcaaaagccaaaaattggagggccaggtgcaatggcacatgcctgtaatccctgcactttgggaggccaaggcaggaggatcgcttgagaccagcctgggcaacatggtgaaaccttgtctctacagaaaaaaaaaaaaatacaaaaattagctgggcgtggtagtgtagacctgtagtctctgctactcagaaggctgagacaggaggatggcttgagcccaggaggcagaggttgcagtgagccgagatgatgccactgcactccagcctgggcgacagagtgagaccctgcctccaaacaacaacaataaaaacatcggaggcttcggcttcatctattacacatggaggcctgttcagtgagaagggagcagcgatgctgggctcctgccaaggaggagactgtctgctccctggaattggggctgtgcctggctcctttctgccccgctttcagggatatgagtccctccaagtccacaggaggtgacagccagcttgcgtcctggggctgaggcagggttagtttcagagcacttttttcataagggtgcttattcttcttcagggccttggctgattatgaggggaaggatgtggccaccagggtcggagaggcctggcaggagaggcctggagctccaagaggtggccaaggagacccagctgtacccgctcagcaacctgcagatcccagcaccccagagcggcagagcagccccagcggatctgagcaacttgtcagacgagagagttgtggcagcaggtaagggctgagctgcagtgggctctgcctctggagcccatgtttttgttgaggtctgcgacccacatgggaaccacttccccacaccctgtgccaatacccgacacattgcacacccaggctcctgttctgtgagtgggtcatggtgattccctggtcctagagcagtgtcatcaggcttcttgtggctcaaggagctgggaggggactgtgataggaggatgtgtctgtccccaggtgtgagaagccctggctaattcccaatgcatggggcaggaaggaaggctgtctctcagagtacaggtgctctacaggtgggggtcctgggcagagtgagggctatttgtgtgggtaaaatgccattgtcagagaaggacagagtgtgaaagagcaaaaaaacaggagggtaaaagtgcaaaagtgacagagtgaagcagagagagagaggccagagggagagaaagggagcatgtgtgagcaggcatgagagagtgacacaggatgtgactggccatgtgttggtgtgtgccactgtgcatgagcaagaggacaaacgtgcctgttactggagctgaccatgtggcattggtgtgagagtttcaagtcaggctctcttgaaggcatcttgcctgccagcgcaaacactgcatgtccttgcagctctggacacgtcaacaggccagtgattccaggggtgcaaagcgaacagtttcttacacaagacagaaatgtagaaggagagagctaagactcatattgccccgagagaggagctagtggaatccagcagggcatctgctgtggggagcaggtggagcctggggttccttttgcagggatgaaagaaacacagtcatctgccttctttgttctggggcttcttgtaccacagaggttccataattattaatagttaggttatttttagggcctagctcaactgttagataacaagttttaccttctaagaatatctagcccatctttgattccttggctccaggccctggagggtcccagtccaaaaacagagtgaacaactttggacttgctgtcacattgtgtggcttctagaactagtcagtgttccatgcagaaggggtataaaaagtgaggcttgtggatgaaggaggaggcgagtggttctgggttttgttttcgttttgcgggggagtgtcaggaaaggctttctttacagggagagtgatgttggagctgggtttggaaggctgagggagattttgccagatgtgccagacgtgcttgggaaggcattccgagtggaggctcacaaagtgtatagggaacatccagtcaggtagccatcacaaaggagggttaatccagcctggcttggcaggaagcaccaagtaggggctgggcaggcacctgctcctaggctgaggagtgtgacccacatcctgagggccttgggagccaccgatggttttcctgcaggagagtgccacagccagactcgagtccaaagaagatccctccattgccctgtggaggaccaggccaggggagtatacgacgagacaaggcaggaggccatattggagactgtttgcttacaccaggggcaaggtgatgaggctgcaagtatttttgaattattaaaggtaaaagcgggcttggcgtggtggctcacacctgtcatcccagcactttgggaggccgaggtggcagtatcgcttgagcccaggagtttgagactagcctggggaacacagcaagaccccatttctacaaaaaatttaaaaacattagccaggtgtggtggcacatgcctgtagtaccagctacttgggaggctgaggtgggaggattgtttgagccttgcacgtcgaggatacagggagccatgttcctgccactgtactccagcctgggtaacaaaacaagatcctgtctccaaaataaaaataaaaaaaataaagataacggtgagggaaaagtggtagccaaggttgctccccagatttcagggctaggcaattggatgggtggtgacaggaactagctgagggtaaggagtttgggggcaggcccgctgagagatgcacagagatgagaaggtcactgggccatgccgaatgagaagtgcctgtaggggctccagccagtgatgtccagtaggctactgagtaaacaaatgtggagttgagcaaagatctgacctggggctagagagctgggagttgtcagctcataggaagtcactaaagagaatgcatgaggttgcctggagaatgcctttggaaggcagtgtgtacaaagcatgtattctcggcttttctctgcagacttccagggacagttgtccagccaggcccttggctgggtgggtgagtccacgtggttcagggatgctgagggaagctgcttcatcagctgacatttctctccattttctgctcttcttttgtctcaaaaagaaaaaaagaggggatattaattattgatcccctaaaaccctagctgaatatataaaatgaaaagaagtaaaaatatgagagaagcaaaggcagatggaccataattttggaaaataattccaaaaggtcttaaggaggaagaggagctacagagaggtattgagaaggaaaattttggataaatggaagaatcaggaaagactaccgtcatggaaaccaagccacgctgagctaactttccagtgctctgtagatgctgaaataggcccatcagatttggctatgtagaactcatgactgccttgaggggagtaggttggggcagtgggaaaggctgtagttggattataatggattgaggagggagcggaggataagcaggtgcagttgatggggtacacactctgaaactggctgtgacgtgatggatgtgggaggggtgagcagataattacagctacaagataatggggaaggtttcctataggtgaaagcaacgtgtgcatgttaggtaaaggctgggcagagggtgcctacgtgaccagtccccgataaaatccttggactctgagtctctcatgaattgccctggtcgacagcatttcacacttgttgtcacaactcactgctgaggggaactgagtgaatcctgtgtgacccactgggagaggactctggaagcttgtgcccgggttccctcagaaatttgccttgtgtgcttttccctttgctgattttgcttcgtatcttttcactataataaaccatagccttgagtgtgatgatgtgatgtgtcctgtgagttcttcttgtgaatcaccaagcctagggatggtcttggggacccctgacacagatgggcaggatcagaactttatgccataacaaggactttagattttctttcgagggcaaagaggagccaggaaggtttgaagcaggggagtgatatggcgagagtattgctttgcaatgggatctccagtggcagtgagaagagtgactgaagtgggcagagtggagcagggagaagaggaagtgcttacagcatcctccatgtaagaaatgatggggcctggactaggggactagctgtggagatggagacagaactgtaaaataagtagaagagatcccaaattggatgacaggtaagacttgggagagcagtgacggagagggaagtgacaatttagaaagccacatttctggtcgagtgagtggagtatgtgacccctcctggcttaggtggtggccaaagtatctctaacctgcctctatactgcctgcaactgactgagcaaatgcctggtccgtggagatcccaagctgacaagggcacctgaggcaagcctctggctttcaggtggaggccctacctaggctggcctggctggattgccctggcacactgctgttttgctgaggcagacagcagcactctgcaagtgctcttctcctgttcctcttagtggtctaaatcctgtagcatgctggggtgcgactgtagacaaatcccctttccgggccccctggggttctctatttgcagtctttgggtctggtcactggcatggcatctcagtaggctaggttcatcaggaagggtcaactatgtcatggcacctgatgggcagcatttagagtctgtgggccaggggcttaagggctgcttactgctaatagttctaagtagcaagcattccctcagccctagtctgggcacacgccaggaagaaagccactagatgtgctctcctagtggataactagcctggagttccaagaagggcagagacaggcagagtgagagccttcagagatgtaggcaacgatagtagcagaacttcgagggagagtagatggaaaaattaaaaaaaatccttgtcattatttttaaatgtctgaattgaccagattagaatctttgagagtctagacactagggagatctcatgggtgggccagttattatatcatatggagggagagtacgtatgacccagcacgagaggaccagaggacagtcagtgctaagggtaaaaccttaggccatgggagattgagtttttcatcagttggcaagttttcactttaatactccactgtttccatcatttcagacgactggggatgataaggacaatgtaatttgggggataaaggaagaactcattatatttcttggatgactttactggggaaatggattccttagtcatttgaaagaagcggtagaattccacatgtggggaatacttgttctaacaaaagcttaataacattagtggcaatgatccttttatataagggaaagcttcaagccagtgagaaaaacataaataaactagtaagaacatatttataaccatgagatttgggtgcagaataaaatcaaattggcagttcaggaaaggtcctaaacatctgtatattaacaatattccatcagtgagcaatgtgaatttcccataattgaaatgatgattgataaccttgtattgttcttatctaatataaggcaaagcagcactggggctttgataaagagcaatatctcatgtacactgaggacactgaaaccccgctaggaattctatggaatttctaaaatatttatattaaggacattttacccattatagactaatttagggaaggttctgcattttttttttgatttgacaatgtttccaatgcaatttatacaatattaaataagactaattagtttttgcacctttcttgttacaaggtgaaagaactaatcctttgagattttccagaaggtccctggcaaatcccaaagccagttttaggtataaaatatatttaagttttgattgtgggaaggcaaatgttaagagttgtcaggagttctcgaacatttgattgaatagcattatgggttagcgagaaatactacttggttagctagtgaatcagagttgtaaaaattttcaagtaaacatatgaggtaacatggttgtaaagaatcttcagttcctttaaaattgaaaagactttaaaaaaataactaaggacataataaactgaacatacagatagggcattacagtattttgataagacataaaatctttgcctcttaggcagatgactcagaagaaaaacagaccatttataactttttattagggacagaccaatgatcaagaattttttttttttttttttgagatggagtcttgctctgttgcccaggctggagtgcagtcgcgcgatcaccatgttggccaggctggtctcgaactcctgacctcaggtgaactgcccacctcagcctcccaaagtgctgggattacaggcgtgagccactgcacctagcctaagaaaattttgttattttaacagagaaaccaacattttaattttatacaagtataatatttgatattagttcttttttgaaaatcttataaatacactgaataaaagttttaaccatgacaaataaaattccttttctgtgaacattttctaattttaaagatatttgtttacattttgtctcacacatttttaaattatttgtcattttaatttgggacaaagctattctctttttccttaggaaaagcatatttgcatacaaagttgtttccctttgccatttttgccattattacttttagcagtttatatatatatatacacacacacttatttacttattataattttaaccattaataacttctctttcacagagaaaacaggaggtaggtaattttgaaatatcatataccagcattttgtagcagactagtaaagcttatgaatatacatctcataactttttatagttgttatatactttttatagtaccattttgcaatgtggacaaatgaacacatttaacagatccatatgtagtcacactgtaccataaaaaaagcaaaaagtatataaacttaaatttaggtctagtgactaagtattttatcttctttataaatgatatttaatgaatttagttaacttaattcagcataagtctaaggttttaagttaccaaaaagattttagaaactgcctttaagcttacatattataaaacataattactgttgaaataaagtttgccagaataatgactcagtttggttaaaagcaaatttaaatttttataatcttaaacatgtagtagatataatactagcttattcaacatgtaaacctgtttaagtttaggaggaacatacccaagtagagtaaaaatatatgcttgtattctgttgtattatatgtaatgctgataactcaaagacacataggtgtctattaaactaacaatattaaactagttttgtttgcccaaagtttacataaattctgtgaacttgagttttaaaagcatttgggttagtttttataagaatacttttttgttgtttacactgaaagtattagaagttgtttccttaatttatgagagctttataataatttatataagtacttatttatctctaagtcaattagaatagaggataagggattttgtaaattaatttggtaatgccatctggaggtactgaactattacacatatacaacatacatgtatactaaacatacagacagacacaaatagagatctaatggcgagccctcaatgggtgcagggggcctgaagctctactggctataggcagttgagagggctgagtgggaaggggaaagcctggtgaagagtagataggggtatgtaggaggtagaggcattgaaggggacagatgaaaagattcagggagctgaagggaaggtccaaggtggtgaaaagaagggaagagggatgcggtaggaagatgagaagggggaatcttagatgagcaggtttggggagaccccaggttccctaataaggtcactgaagttccaaattacccttcgtgattactttttttttttttttttgccagttttggaaatactggacagaatgagtgccataggggcagggcatgtagtcagcaagggaggaggaggaggatgaggaggaggaagggcacccagtagattgagagttacctgtgggaagaggcagatcaaatagagaaaggagccaggctggacagtctcattaggaagttctgcacacagtcgtcatctgggagccaaagtttctcttcagtcctcattgaggagctgaagggctttccttgtgcaatctctagacaaggtgtcaagggaaacaatgaggcctcacaaaagagccaggaatttggagtaaatctccactcaaaaggaaccaagaaaacttctatccaggacgattctggctaaaattgaaaaggaccaggaagagtcctgctcaacagagtcaggggttaaatccccactcaaaaagagctaggaagagttctgtctgcgaagattcttgctcaaacagaaaagaactgggaagagctcatttaacagaatcaaagtaactgaatcacagaaccataaaaagtgtccaataaaagcaaataccgtctctgggcagggtgcaatggctcacacctgtaatcccagcacttgagaagctgagggaggaagatcacttgagcccaagggttcgagaccagcctgggtaacatagcgagactcctatatctataaaaattttaaaaattagccaggcatggtggtgtgtgcctatagtcccagctacctgggaggctgaagtagtggaggattgcttgagcccaggagttgaggctgcagtgaactattattgcaccactgcactccagcttgggtgacagagcgagaccctgtctcaaaaacaaaaaacaaatatggatttagatagagacttttattttattttattttattatttttgagacagagcctttctctgtcacccaggctggagtgtaggtgccatctcagctcactgcaaccaccacctcccgggtttaagcaattctcccgcctcagccttctgagtagctggaattacaggcgtgcgccaccatgcccagctaatttttcaatttttaatagagatggggtttcgccatgctggccaggctggtcttgaactcctgaccccaagtgattcacccgccttggcctctcaaagtgctgggattacaggtgtgagccaccgtgcccgaccaatactttatttaaaaagactattgcaatagggacaatgctgcaacctcaggacttgcaaacatcacaaaataatacaaaaaacatcacaaaataataaaaaaaaaaaagcctttttttttcagtagggagtagtaagcacagctagcagctcagctactttcaagggccagtgggcaagcaaaggggaacctgtttggcatgatttgaccagaaatgtgtttccctgtggtcagccggttctcaggagaagctgctaagtggggcatgttctgcattgcagcacttacttaaccaggagcaagcaaaattcaggccctgtggggaggacagaagcctgcctaacattctgtcaaggcaaaggagagggtaaaaagcagacagctgtgaacacttgatcatccttcaggcaataatccattctgggtttctggcttaagactcttgagaaacaaggggaaacaactggtaggagcagcaggctcacctatatgtagttccgtgaggtagccttatggacttctgccaccttccaaaactcagcatgtcccaaaccatctttatcaacacagcttctcaccaaaaacaaccaaataaaacaaattaactaatgtactaattctgtatctccccctgtgttgttcatctcaaaaaactgttatcacctcattgactcagactctcaaccagcgaggtagaagaaatgtttgggggcatgttaaatgtaacacctatgagacatgtaagaggtgaggtgcaggacgcaggtacatggtgataaaagaaaaacctcagccggattaaatttaaaggagtttcattgagcaatgaactatttgtgaatcgggcagcccccagaatcacagcagattcacagagactccagtgcagctacatggtggaagatttatagattaaaaaaaaggtggagggggggaaatgacgtacagaaattggaagtgaggtacagaacggctggattggttacaggttgggggtatgccttatttgaacacagtttgaacactcaccagtgtatgaatggttgaagtatggccgctgggattggccaagagttagctattgttacaggtacacactcctaagttaggttttcaattttgtctgcctctaggttacagtttattgacaaagactcaaatatagaactatggagtccttctcaggccgtatttaatttgctttaacaattccccctttttggtcattttctcaactttgagagattgacaaaaaccttagttattgatatcactattacccttgtaaatgtacttatatggtcttgaaacccactgggaaacaggaggacagtgggttttgtaaggagagaataaggactgagtagaaggtacctctttatgctagaatgttctgtttacaggacaaaaacaaaacctggtctgttttaataactatttgtttccttaaagtcttagtttgattatgttacatttagcatgagcaactccattttgtttggtttggtctgttgggtcctagtgcatgagctcagtacacaacaatggcttgccagaattttgtttaaaaaattccccttggctgggcgtggtggctcatgcctgtaatcccagcacttagggaggctgaggcgggcagatcacgagctcaggagatcgagaccatcatggccaacatggtgaaaccctgtctctactaaaaatacaaaaattagccgggcgcggtggcatgcgcctgtaatcccagctactcgggaggctgaggcaagagaatcacttgaacctggcagtcagaggttgcagtgagccaagatcacgccactgcactccagcctggtgacagagcgagactccacctaaaaaaaaaaaaaaaaaatatttccccttattggccaggttctcacttaggtgagagtgtgaccaaaacttagggccttagcaccacttttagttacctagttaccatcattttaggtttccagtctcagcatgtcattcataggttatgatgtcctcataatcatacatttcaatcagttttgttattccagttgaagagagaccatttgacatttcagagatggctgcatgcaaacatttgaaacctttgagagaatacagtgcactggggagactactatgactaccagtaggataatacccagagtttgaagtatgctgtttacctgaggtccccataaaacaaactgcctaaattaaataaaataaagaatgagctagacgaagagtctactcacttcactaagtgatcttttcattaatcctgtatgactgaatttttataatctgcacttgatatacatattagaattttagaaaccccatataattttggaatatatattaatataattcactaaaaatataccctgaagattaaacattatttttattggccaagcgcggtggcttacacctgtaatcccagcactctcggaggccgaggcaggcggataacctgaggtcaggagttcaagagcagcctggccaacatggtgaaaccctgtctccactaaaaatagaaaaattagccaggcatggtggcatgcacctgtaatcccagctactcgggaggctaagactggagaatcgcctgaacccaggaggtggaggttgcagtgagcagagatcatgccattgcactccagcctgggcaacgagggcaaaactcagtctcaaaacaaaacaaaacagtatttttattttgacaatgcctcccatgatttttataccaaataagccaaatgtcactgttgcattagtgcattatcgatgtcaaacccaattcttaaataaaaccttatagacaaatgtattcaatcttaatcagtttgaacataaggtaagaattttataaaccttttataaccctttacaatttttgttgaagagcagattagtgctctaagaaaacctgttgtgcttttatgtccatgttcaatttatggaaaaacctaataatacccttttaaatttagtattatcatacataaaattttttacaaggttaattttttttttttttttgagacggagtcttgttctgtcgcctaggctgacagtggcatgatctcggctcactgcaacctctgtctccccagttcaagcagttctcctgcctcagcctctggagcagctgggactacaggcgtgtgccaccatgtctggctatttttttttttttgtatgttagtagagagggggtttcatcatgttggccaggctggtctcgaactcccaggtgctcaaaggaaaatttaagacagtccatggaggagaaaggtatagacaaggtcatgcagatattaaaccagaaaggacttatttcctaagccaggaatcgaacccagactgccactgtgaaagggcaaaaccttaactactgagcccagaaggagtctagagtagttaattttgagcttgcaaaggcttttaactagtcaagataatttttagaactaactatgatatgaaccctaaaattcctgttccctggaaggtagagacaaggagaaagtactgccacatggttacaaggtcaagctcccaaggacataaaacaggatggcgaccttgtccagttttttgttggtttcagggacctgcagcaaagtttgtcactgaccagcttgctgggccatcttgagcagcaagcttatgggggcccaagcccatgttttatcctaaggtacccctcgacacagaaaaacgactttatagcacaaaatataccagattgactacagcttaagactagacagcctcagaattcctttttgcattaattaaaattttacagaggagataaacagtgattttacaatcagtttgcacagagagagagaagcctgaaatctgactgggaagagatatttacccttttgctggcatgccaggcttctgggctccctttccctgagtggccctggtgatctggctctctgcaccattgccccgggagccaagccacaacacaaaagaatttttttttaaaatgcacttcagtgtgttgttgttcatttggaatgttccactgtaagttatctttcgtaagatgtcaccatttctgtaagaatttgctgcctcccgggcgtaatgtgtaacccagaaggaactcagttttccagaagcaattaataggttccatggaatgttgatggtaagaaaggaaggaaaaggtgacaagagtgagcgtagacagctctttctaaggagtttggctgctggaaggggaagagaagcagctggggttaggtgggaggaactaagtttagagacgctaaaagtgtatgtagcaggagtcacctgatcaggttgaactgcagcaggaacaaggaagttccattttgactactattagttgcaaattggacccttatgtcaactttttcatctgtaaaaaaaaagggatggccaggcacggtggctcacgcctgtaatcccagcagtttgagaggccgaggcgggcggattgcctgagttcaggagttcacaaccagcctggccaacaaggtgaagccccgtctctactaaaatacaaagaattagccacgcgtggcagcgggcgcctgtagtcccagaatctctggaacccgggaggcggaggttgcagtgagtcgagatcacaccactgcactccagcctgggcgacagaccgaaactccgtctcaaaaaaaaaaaaaggggggcaggggatgaaaatgctattgctttccaggaatagctatgactacttccaataaagaagacaagaaggttccacatgtgaaaactacgcggtcacaacgataagtgggcgggtgcacgcacgcgcgctgagatcgtgcgtgcacaggccggggtgcggccggcgtgagtacgcctgcgcgtgccgccatttcctgcagccgcagactctgcctgcggtgctcgccgggaaatgagacgatcaacaaagaaaatggttgttttgggcgagatcgaccgtggagaggctttttctgcagcagtcccggttcctgccgccagatggcgctcgaggatcacaaatgggtctagggttctcataatggccccgcctaagaaattttggattctcctggcccttcccccctttgtggggtcaacagcggatttgggaatctggtgaccaacacgtgcgcactcccctacccttgcccctaccgagccctccagggtagcttgggggagaagctcctccctagactgccgggtatttgatgagcctggccagcgcacaggtcttgagcaccatggtcagggaagaaggctgaatggcttaggtcttcctagagaggccggaggcgggaaagaactggagaaaggagagatggcagtgggaggatggggacaagaataccagtgtgtttccagccagaagacgatgtcttttaacacctcattgaagtcgtcaggtgactttgcccttgtcagaaaggagcagcactgcgggggtcctactgaggaggagactgactgctccttggggtggggattgtgcctccttcctgtctgccccactcttggggagatgagtccctccaagtccacgagacatgacagccagcctacctgccatgggagaacaaagtctagtctcagggcactcacttcataagggtcttattcttcctcagcgtgttgactgattttgaggggaaggatgtggccaccaaggtcggagaggcctggcaggacaggcctggagccccaagaggtggccaaggagacccagctgtacccactcagcaacctgcagatcccagtaccccagaacagcagaacagccccagcggatctgagcaattcgtcagacgagagagctgcaccagcaggtacgagccaaactgcactgggaccttacctgctagagccagtgtttttgtccagggcagcaacccaggacaaacccccacacactaggcatgcctgtttatcctctgcaggtgagtgtggttaggagccagagggaaggagagaaaccagcatctcaggggtagatattcatgggtttcagcttggagccatagcatcaaatctgttagactaagtctggcacagaaaggatgcacagagaaccaggttgtctggcagccagttcgaacctggaaacctgggtcaggggagggatataggttgctttttctgttaatggagatggaaactctctgagcaaggtgtgccatggtgtggatgtgattcactgccagaaataacaactgtaccagttggatgagctcttccactgccatcagcactgggatggccatggatttggacagtaatgtagctccacagtgctgactcagggttgctcattgattgcaagaagttggcagcagtagcctgaggaaacaggggctctgaattttctgagagagaccaagaaccaaggaacagccaggtactagggaacagacaacaccagatgcttgtgcttttctgtgagcagctcaggtctcccaaagtggtagtttcctggcttctggcctttgtagatcagtgtggatccacacccaattgtgatgtttgtggtagctgtaagaactttcccaattttgaaatcctaggtgacttgtagcatattttttcacatttgaaaataattgagttttgaaaatgtttttacaggcaatctagtatcagattttatatcatcctgaaacattctgtcaattgtcatttccaaaaatccatggaaaactggagttgttgaactggaaacagtgtggtctcaggaagtgcttcacagccattgcaacatgggcagggcctagagggcaggagagaatgccatgatttgatgacattttacccattcctgccaggtgaacttcatctccctctctgtgacagaattttctggctctcacatccagctttggtcactgggaacccacctattggctcttgcactggcaggacatgtggtagaggcttccagttcgaggcaggactggctgcattttcaagatgtccttatttctggtattttgtggcgatcgtcctgtccacttaactgattttgacccattgccttgctgtgatctctgtgctctctctgtctcccagttccaggtcattcccttgaccagcttccagtctttcctcatcttgtccctgccaatgaagtattctggctctgccttcactctcctgccatgatccattgctttgatagggtggcttcaggaacagggtgaggagagggctgtgctagctttatcttgccaaggaactcagcaaagaaaatttttgctgacctcttgcattcctcagcctggctctggtctctcaaacctaacacatgggatgcatgccagcagccagcctcagtttccctctggtccttttctgtgtgaggccagaggtccttgctttatcactgcctggagctgcagttgatgatggtgaaagaaggtgcacgtgtcttttgagagctccctttgttccccagagatttttttttcccaaagtggccatgagtttgggaataaccaggagccatgggccgccggctagagatgctgcatactaagagcctcctgtgagcagccatgtacacagtgaacacgatggctaaggccccatccagccgccctcaaagagcacatagtccactaaggaataagcatgatcgtaataaccattagcacctgctgtgtgctgagaatgtgcaggcactgttctgcatgccttatgtggactcactcatttaattctcacaccaactcaaggaggtgcttttattatggagaaactgaggcagatggaggttaagtaatttgctggcagttttgcagccaggaagtggcctaaccgagattagaatccagacagagatcagagcctgtactgttcatcgctgtggcatccatactgcccctccatttgtgataagcccaggaaggaaagaaaccaggtgctctgatggagaggggttagagcaaggatggttagggaaagcttttctatcgaggaggagacagttcggctgagacctgaaacatctggaggagcctgccttccaaagaacctggggagaggcattgtggacaaagaagatagggaggagggcctgaacaatgagccctgtgcttggagggtacggggtgaggtgagcagggggcaggagctgggccctgtagggtcttgtaggtgagggagaggaggctattgggagggctcctattgctcacattgcagtcctggggggatgcccagggcattttttcttttttttaagaggcggtgtttcactgtgttacccaggttgtttttgaattcctggcctcaagtgatcttcctgcctcagcttcccaagtagctccagggaatttctgttttaccttgcctcttcagttgcgccgtccccttcagtattctgctgacatggatcacaggataccagacacctggtagttgttcagtcagtaggaggtcttccttccttcctcttagaatcaatccttttctcacttgttggctctgcattttatcccccgtgtatcttttcagatttttgtggggcctcctctcccatccagtccaccttctccagtctctatggtatatttctttgtcatagggtgaagcaggaacaggtacaggatgattgggtacactgaggtgaggtaggagggcaggccctcaggaagggcttcccagaggaggtgatattgtctgcaaaggcatatgagagcctggaagtccaggggaactgcaggctggtctgtacggcttgagtggcacgtgatacagtttgagactatgaggcgagagagctaggcagatgctagaccatgattgttcttccctttccccactcttcaactagttgtaatcttaggcattggattctctggcaaggggacaatacccagtagcctgggccagatggaggcagccatatctggagtatgatctgagccacagcatgttggagaaaagccagaatcagcccagggcagtgtgcacccatagtgctggcctcaggcctttggagggtgagcagacttaagttggaaggtgcaaacaagtggtcagtggtgctgcccaacatcgtgccctgaactgcagttgacagctacggcagctttggtaatgaggctcatagcctgggggcaggcagagtgagagccgatattggcttggccagagaaaagcccttttgggctgccgaggaggttggattccaggccaagggccatatctggcagctgaagtgtggaggttcagaaaaacttcgacaccggtcagtttcccgcctctgctgggaatgaggtgcatctgactttcctcctcaatgatgcctaatttcatttggtcctctgccccttggccttgtgttctctagagagttccctgcagggtggcagaaggagctgatcctagtaagggaccgtcccatccagtgaggaggtgagctgggctgtgtcttccccttctgcaccctcctgactgtcacatccccgggagccccatgattccactctaactgagtgaatcacagaggccaaggcccttggctgcagtcaggagtactgagtggacactggaagattggggtcttgctactgactcacgatgtgacctgggacatgtctcaactcacctagcctgggtttgcttatctgtaaagtgagaagttccatttgttggtcttggaggaagcttcaagagcagtgctcaagggttaggctcagaaaagcctgtttgaccctggaaggtgtcagctcccaggttgacgtgcccacccctccctttatttctttcagggtgaggagcccctcgagctgcatggtcactgttactgtcactgccacatctgagcagcctcacatttatattccagcccccgcaagtgaattggactccagctctaccacgtaagaagggctatctagcaacctgggagatgttcctccgccacttcctccttggcggtaaaggacttggcttttgttccatgttgcttcccatttagtgccttccccagtttctagcaggccattagccaaggggccacacaggacagtgttagtcccctaatataaactcccatctaccgggcctagacattcccacacctcctttttcctatctctgtaagaggctgcagtggtacttcctagtgcactagtggatgtggctctgccattcatgggtccatgcctgggaagccagctccagtccgtgaaggccgggcctgtgagggcattcctgtgttactgtaaaggaatacctgaggctgggacatttataaaggaaagaggtttaattggctcacagtttggcaggctgcacaagcatggcaccagcagctgcttggcttctggcaaaggcctcgggaagcttataatcatggtggaagccgaagtgggagcaggaccatcacatggcacgagcaggaacaagagtgaggaaggggagggcccggactttgaaacaaccagatcttgtgtgaactaactgaatgagaactcacttttcactaaggggatggtgctagctgttcatgagggatccccccatgatcccgtcacctccctccaagccccacctccaacactgggaatcacatttcaacatgaggtttgtctgtctctgtcacatgcccactgcttcacctgcattcctggccacctgtcagggtgcaggaagggatgtcactgcaggaaggctgctcagtgaggtgtgtgtgttgggggcgggaggggggcatatccaagggggcctctgcagacatcaggtcagcaggctggagtgtgcagcatggaaatgggggaaaatttggggccatcctgagcccagcatgatgcagaccttgtttccagtcctgcagaggccagtccaggatgaggcaacctctaggcctctggactctaggagtgagaatggagaggttagatgtgaggtggagattgcacagtagctgagtaccttctgggaagtgctgagtggtaaagactgacagtgtaggattaaggcttggaggatatcttggttgtgggtagaggggaaagacgacgcagccctaaagtaggggtggaaagcccacaggactgaagtgtagaagtatagaagcctggggagaagatggggtcaccgaggtctgcatggaggaggacagcacattgtcattggttgcaggaagcccctttctggggccctcagtccaaacacaacaagagacgctcatggcctgggattgtagtctgagtccacagcagtgccagtgcctttatcctgggccttcccatgagctctttcacttccttcaaaccaggctgggtctccccagccctgaaccactcctgtgggccaggcctggttccctggaatcttctggtgtacctctgatttcttctgtgctccttctacagcaaagggattctcttcgtgaaggagtacgtgaatgctagtgaagtgtcttctgggaagccagtatctgcacgctatagcaagtaagagcgggtcccaaacccttccatgtcggccttctcctgccggctcccatattctcatccctgcatttccagttccttgtccaggacttggctcagagtagcttcggggtaattgtcgagtggatgagtgatgtagttgccctctgatgggattgatgcattttctactgaactgggcacctttgggttctcccttccggtgaattcatcctgcacaccattttcactgccattctgttctgcttgtctttgttattttattttgtaaaatgctgagaacacccctcttgacagagctggcagagccctagggaccaactagctcatcctatttcttttcagatcacagagctcttctcttctgccctcatgttcttttctgtcatgccaggctgcctcatttgaacacacatgtgactgcagttcctgatacatgtgtggctttgctttttaattttaattaattagttaattaattttaattaatttttttttgagatggagtcttgctctgttgcccaggctggagtgcagtggcgccatctcagctcaccacaacctctgcctcctgggttcaggcaattctcctgccttagcctccctagtagctgggattacaggcgcccaccaccatgcccagctagtttttgtattttagtagagatgaagtttcaccatgttggccaggctggtctcgaattcctgacctcaagcaatccacctgcctcggcctccccttttcattgatcatctcttcattttcttgctttgtgatgccatgtggaggggtacttccatgtcacctcggtgtattgctacctaccacactgaggtgaggtcccttagaatgtttcttatgacatgtcatctcactggaggattttagcaacagagaggagcatcctggccttatttcaggattgggcctctggggcttctggactggcttttattggtgctgtggaatgatgagcatggctgtgggggtcaagttcaagccccagctcaggcccccctgttaggatcacttcggacaagatgttcaacctctctgagctttgctttcacatctgtaggcccttagggtggtttttctcaacagcttattgagttataattcaccctttaaagtgtacagtcccgaggttttggtacattcacagagttatgcaaacatcattatccaattctggaacacctttgtctccccaaaaagaaactccaaacccgtctgcaccccctaattctaccccataactcaagcacaggtattataccagaatgatcccttctttcttctcattcccagtatctgatttctgctgagtgggctcctggtgactgtcacattatatcataggtggggaggaaagctctgctgttttcccactggtcagtggggtccccttggcatatacaacctcaggaatcctagccacccagccccgatcatctccctcattgtgaaaggtctcctttgcccccccatagaagggccctgtggcaccaagtcatgaatgacgactggcatcgtagttatgtctcagcttgtggccaaaggttaattagaaaattaactatgatagtgatttggctctcatctctgccctcctctcccctatcaaactccctgcagcgtcagcagcattgaggactcattcgccatggagaagaagcctccatgtggcagcactccatactctgagaggtatgttgactttcttagcacggagcttgcacttctacagaggagaatcagggaagggagagttcctgctgagtctgtttgcttttgtcttctgctttgcagcctccaatccatttgcagaaaggtgaaggacactaccgtagggtggtgcttcccttgttgggatatcacacttgtgacaactaaagcctttgaattgagctaagactagagggtagataccagcggtgactgagaagggaagtggtggcatctgacaacccagaggactcgtgtcagcaggaggggcccttcagattagaacctaatcaatcacttcattaacttgcaaatctaaccagaagtaaaaataaaatgactacaaaagagaggagtgggcagagaaggaagaaaaatgggctgctggcatcaagaagccagaaagacacacaaagccaagaatgcccagtgctgtggagccaccaaattgaaagcaggggcagagaacacctcgttcagcagttttgaaagctgtcactagatgatggcacagtcactagagagtcttaatgacaaagaaatcttatgttcagattcttggaatggggagaagagagtctcagagattgagttcactcaggcttctgtgaagaaaatggaataaatagccttcagtccacagtaagcaaatacggcagacccaggactaaaccccagggccctgactactcccaggttagggatgtttctactctgccatcttgcttctcattgatgggcagatcttaattcatgtggatgacattcagagaccaaagctacattggggaggaaaaggaaggaagtaagagggttaagataaagagaatcctaccgggccccagaggcaaacatataggagcagacaagcatatggggccagggaatctcctccactatagctgaagaagcaggtggttctgagtaactacagattacttggtgaggcacatcagcagatgaagtcttagcagagaagggcaggttggtcagaaacctgagagttaaccacttacataggagcaaatggaatgaggcttccaattctagtggagtgacaaaccagatactctagggacccccctttccattgcacaactactaaatccagaatcagtcattactgatccattgctaggcttggaggaaggaaggggactctctagggacaatctcagtcacttgcacacatgcatatgcacagacacacatgcacgcacacaaagaacagctgtgagctggtgctgctggtggtgaaagaagcaggaggagcagggctgcgctgagggcaaggatttcaagcagcactgctgtccagagtgaaccctgggccagcagcaggatggtgggccacacccaagctgcccgtgacacttctgggtcctccgacagagctaacgtggatctagattgttaatgtccccccgccccttgggcttctgtcagaagcagacccaaatctctggaagaaagtaccctgaattttggcttgtaggatcagatcaagcagttactttgaggaagtgcagtctgaggaagaaaagcagaggtgactctcagaaacaggcatcctggaactggaaagatgctcaacccaggagtcagtatctagaacttcagtgtcggatctgagtaggctctacagacagagcatgaagggtgggtccaggagtataggcaggggcagagctcagttggcccaggcgtgaggagaagggccatcaagacggggccaggcagggcacacaatgacatgtctcctgtaggagaaggcattggtcttcctgctctagagggtagcaggccccagcggataatctaagcagaaggtcagggggaggcaaactgtctggaataagtatcatatcaggacatctacaggagacatgtcattgtgagctggaaaaagatgcatgactagtttttggaaataatgcagaggtctacagcaggctgagaactgatctggcccagggctgtgctgcacaccacagaaaacagtggcatcctggggatcctgacagcaaacctgggcctggctgcaccaaattggaaggtctggctgtgtcacatcagaggtctgtacaccagcctgaccaccgggttattgttcttcatctcacaggacaactggagggatctgtacttactgcaaccgtgagatccgagactgtccaaagattaccctagaacatcttggtatctgctgccatgaatattgctttaaggtaaaaaagaggtggaagacaccttgagctaggcggtaactcctgatcacgtgctgctaagaacgttttgtagagtgcgggagtcttacgggttcagagactgtggaggaggcttgatctccatatacaattgcacatagtcgcagaggctttgcacaactgggagctgaatgagcttccaagtctaagacagtagatgagtgttggtggttctgcatgcttagtactgtagggaagacaaaagaggtcttttcaggaaagactatttctggcagagggccagcaagtgcaaaagccctggggcagaagcactagagtgttctagcttgcgtgggagaatgccaggagtgacagagtgggctagatcatgtaggccttggcgggcacagagtttggattttattctaagtgacattggggtccccattctccacagtgtgtggcactttgtaaccccaggttgttggttccaatccatttagggtgtcacctctgggtgcactgagaaaaacaaccctcccctttgccttgacagaatgttaggcaggcttctgtcctccccacagggcctgaactttgcttgctcctggttaagtaagtgctgcaatgcagaacatgccccacttagcagcttctcctgagaaccggctgaccacagggaaacacatttctggtcaaatcatgccaaacaggttcccctttgcttgcccactggcccttgaaagtagctgagctgctagctgtgcttactactccctactgaaaaaaaaggcttttttttgtattattttgtgatgttttttgtattattttgtgatgtttgcaagtcctgaggtccaggatgtgccacgggctcacagcatctgctcgcccaccttgttcaggcatccccttcccactccactcattcctcttgctttgctttgtgtgttgacctccagcttgcttttcttttcagtgtgggatttgcagtaaaccgatgggcgatctcctggatcagatcttcattcaccgtgacaccattcactgtgggaaatgctatgagaagctcttctaggtgggtgctggcactgcaaaggacaagtggccaagagactcattaaggagtagagatgcaccctggtctctcctggagtctcagccccagacacagctatctttcttggctcttccttatgttcagggggccttgtgtcctcatgtccctatgccttgtgatactttgagatcttaggtggcatggacaaaggccctcaatgaggacacttccaaatcacaccttccgtccagcacctgagccgagccctctagctaccctgggatactcgctcggccgctgttgttagccccattttgcaacaaggaaataaagatatagaaagggaggggacctggagaaacccaggtagaatcaggacctcaccccaggtctttggattcttgtccagggctctctgttcactgtcactcgcatagcttcagatcaggactgcatagccatggtgctcagtgaaacaagcctctgggccacattatgagaactgcctgaagatgtgtgtttgcatgctcatagccagtggaatttatcacggtgtctgagcacagagcagaatatatcccttgaaggcagtagcaaccaggctttccactagctccatgctgatggtcttctctccagaagacacaccttgagctaggtggtaactcctgatgactggagcagtcacccaccctgagggcctctagctgatgtgtttccagtctcatggctacttctgttttcttttagcgaccccccaccgccaggctgatcagaagctgatgactcgtggacaaatttggctgtccccagttttgccccaagttgctgtctccccttccctcacctcctccctccctgtttgatttcttcatgcttttgcccttctcaagttgaagttgcatacatccaatatcgtatcttaatgatgctatgataattgcttgtgtgtgtagcttcttgtagcttagaaagcgctttatgcccatgatgtcatttcaggctcaaccaaagaggatcaaacaggaattccatcttggcttccctaagacagattggctttctaatgagtttaagtgggcagaagtgtagggttcagtgtgtcctgactcccttgaggcttataatgggccaagttgaagactgttgatgatccctggtgggtaaattgcagacatcaaatgctagggattggcataggctagtgtttagcttgtctatttgccatatctattttttttaaatttccatacacttgtaaaagtagttagttgcttttgattgagttatatagcagtttttcatttggtcttccactcacctttcactatatttgagtgttcccttacaggtatgttggcatgtgttggaaaatttacacaattaggtttaaattcagtaggatgtgattttaggatgctactgatcaaagtgatatctgtgtctgttggaatcttgatagctgattaatttgccctcaattctgctccctgaacttcacacataaatcttcccaagtgggttttagggtgtatagatcccagcaggattaaggaggtggaaaagcagctaacatttcttgaggctctaccacatagcaggcactgtcacagagtaatggcattaatccccataataatcctgtgaaggtgatattctcatcccatcttagacatgaggatattggaactcagagaggtggctattgcattgcgcagaacgctacagagcccatgctcttcccagagcagcacccacaaaagcaagcattgattttgtgctcagtgtgtgccaagcactgtgcagagggtacacagttcctgccaggttaacaccctcccttcaggcctcccaaaggcataggcttgcaaagagcagaaggtgtgaaatcacactcttcctctgggcatcctggatccctgaattatccccccccccatgaagtacttcaagggccaagctgcccctttccctcctctccgcccatgaaaatgcctccaaactgagatgctttcagctgagaacagatttgactcacagacattaccaaagaggagcttgtgaatccaggaaaagctccagggggctagctgatctgagcagagagctttcagtgacccattttcctgtctagactctgccttaagctagtggcaactgctggggccccaggtacttgggacatggaaactcgttggatggctgggcagatgtaagcctgtccatgcagtcagccgatcctctgctcaggttcagctggactctgccatctgtgggcccagcatcactctgtaagttccttgaaaggaagaacaaccttagagtatttctgatacaaaatgagggcctctgctcttgatttaattataaaatgtctacgtctttctccagtttctgagccctatgcacattggcttgtgggcttgttcttcctgccaaatgatcagagaggaacattccatttatttgtagtggatttcctctggagggcatgtacccacactaaataccaactgctcttcctcagctgtagtccccaacatcagacttggcacgtggtggacactaacacacaggcactcaatgaatgagtgaaggaaataaaagtcaccccgttggtgagaggtgctatccctgagtctcagtgcaggaccagtggatgaaaggcaaggtaaagaggcccaagataggctggcttcccccgttcaaggtatagtctgcctttaagggagttttagaaccaacatgcaagacattgaaagaaatcttgcaagagccattattgacttagatccaaaacagcctctctcatgtctaaaaaggcacagaattttgcagatctgaggaagagggatgcattacctttttgcttcttttcaattgcttagtgtttctaatcatacttaatccacactaatgtgcgcaattataataaatggtaagatatcacatgtgtcagtgttaaagttttcttttgaagtgtaataacttggtgtattcagctgtgtgatttctttattcctattgcctgaagccattctctgtacaaaagtaaacaagtacttaatagcaagctctagacactgggcatgcacaggaactgtggaattctagacacatcaaatcttaatgaagaatattgtattgtggcggcagagagcgggggcggtccatccttctcatgattaccactgcagacagacagccacctagtcattagtgcccacttccagtgaccaggagctcagttccttacaagcccctgctgtctgtggttttagaagatgcattcttcagttgagttaaagtccatttctgtatgtcacccactggtggtctttaatccctccgctagatgccagctcttaaaatagatgaaaatacttctcagattctgtcttggtcaactcttctcacatttaaacacccctggtccctctaactcttccttgacagtaattctgaatacacatctctcaaaggccctcctcaaaggtgaccccaacacatactccaactcattcctctagatgtgtaccagtgtaatctgcatgcgatccaagtcttgattcaacccagggacaggaaagggtgatcaggaagtccaaagatagacataatactccgagaactccttctgccactgagtaggggcctcagggccattggactagtgtccctctagctattttctcaccccaactttggccttcatcttgttacaatgggaaggaaggaagagcttttactaattcaaatgacaaggactgcaacagtagctcctaactaggtatttgtaggacttttaattggtgacagtgtgacacaaagacctaaaggaaaaataggggagggtcattctgaaacagcaagtcgatcctattgttgggcctcctccattaccatgactcctcctttctatcccaggtttgtatctgtgacggtctcctacccatgcatctctatgtcctctggggactgctccttgcttaggattgtgtttggcctgtggattttcctccccagaatgtattcctcttgtgaaacttctctgtacagtatcctctgcctgtgaaggtcccaaacctgcttctgaatgccttcttcccactgtcctctgcctcctaatgccttctgctcctggctccttgcacagtgccttctacctgcagatgccttctgctctctgatctctgctgctgagtttgttcatcacctagggcccagccaatgaggcctatctgcacaagggcttctgcctgtaattgcccttgccatagtgtgctttgcttagttagtcttacttaaggtctgttgattttcttgtttgtaaagaaccacatcattgacttttttaaaaaaaaatcattttattgatttttttctattattttctgctctctgtttcattaatgtcacctttaatctttgtcatttcttcccttctacttgctttggatttactttgctcttctttttctagttcctttaagttgtaaagttaggttattgattggagatccttctttcttttttttttttttttttttttttgagacagggtgttaccctgttcccaggctggtgtgcagtggcacagtcatggctcactgtagccttgacctcctgggcacaggcaatcctgccacttaaacctcctgagtagctgggactacaggcacgtgccaccatgcctggctaattttttcctttgaatttttttgtagaggtggggtttggccatgttgcccaggctggtctagaactcctgggctcaatgagtcttcccaccttgacctcccaaagtgctaggattacaagtgtgagccaccatgcccggccaatatctttcttcttgaatgtatgcatgtacagctggaaattgttctgtgagcacttctctagctgcatgttgtgttttccttttcattcatctcaaaggttttctaattccccttatcacttcttatttgatccactggttattttggagtttgttgtttaatgtgggttccccaaatttccttcagttatcagtttctaatttcattccattatggtaggttaacacactttgcataacttcaacattttaaaatttgtgcaggcttgttttatagccctgtgctttgctgtgaatgtgttcttcatggggttctccctgcacagctgcggtcactgcctgtgaccactgtccactctgccctctgccttcacagcctctctgaataatgcaccctgcttgagaactgcctctccctctctctgaaagtctgctgcacattgctcttcatttctgaggcccactgtacactgtgctccgcattgtgctagctgtccagttgtgagcttgctgcaacgtggcatgcataatgcttggctgccagatcacctccttatcatgtcctctgcctgtagtgcccttggcagatccccctgcttcagtatctcctcccacaaatgtcttctgcccatcgatgccttcttttgatcagcaccttgatgttccagttggtcacttaatcactcaacaagcattgattggatgtctacccatgtgccagacgtgggggccccagtaaagtagacacagtttgtatttctgtggagctcacagtgtaagaggagaggagtaaatcaaacatcccacaacaaaatactgttgtgataagtgctctgaacaaaacatacagggtatgttttggagacagggtcaaggccctcactgcagccttgacctatatgctataatatagtgacctactctgggctgcttggttatcgggggaacccgcccccaatatttcaacgtaagttctttctgttttccataaatgtcagccagctgagaaatagaaagagtacaaagagaggaattttatagctgggcctccgggggtgacatcacatattggtaggactgtgatgcccacctgagccacaaaactagtaagtttttactaaggatttcaaaaggggagggggtgtacaaatggggagtaggtcacatgctttaaggggcaaaaagcagaacaaagatcacatgcttctgaggaaacagagcaaggacaaaatcagaactcctgataggggtctatgttcagctgtgcatgtattgtcttgataaacatcttaacagaaaacagggttcaagagcagagaaccagtctgacctcaaatttaccagggctgggggtttcccaatcctagtaagcctgagggtactgcaggagaccagggcgtatttctatccttatctcaacctcataagacagacactcccagagcggccgtttatagacctccccccccaggaatgcattcctttcccagggtcttaattattaatattccttgctaggaagagaatttagtgatatcttccctacttgcacacgtctgtttataggctctctgcaagaagaaaaatatggctctattctgcccgaccccacaggcagtcagaccttatggttgtcttcccttgttccctaaaaatcgctgttactctgttctttttcaaggtgcactgatttcatattgttcaaacacacatgttttacaatcagtttgtacagttaacacaatagtggttctgagtggacctgatgtatattctcagcttacgaagataacaggattaagagattaaagtaaagaccggcataagaaattataaaagcattaattttgggagctgataaatgtccatactaaaatgaaatcttcacaatttatgttcctctgctgtggctccagccagtccctccgttcagggtctctgacttcccgcaacatctctccctttctttttgaacataacaggattaagagattaaagacaggcataagaaattatgaaagtactaattttgggaactgataaatgtccatgttaaaatgaaatcttcacaatttgtgttcctctgccacggctccagctggtctctccgttcggggtccctgacttcccacaacacttagtcagggaagcttttttacatttttgtttttagagacagatttttactctgtcacccaggctggagagcagtggcatggtcgtagctcactgcaacctcaaactcctgggctcaagcagttatccaggctcagccacctgagttgctgagactacagatgcacataccaccacatctaacagagaagcttttcacaaggacatgatatttggctttagtatgagtttgctatacaaaaggaggctatcttccaggccctctttaatgttcccctgcactcagctccacccctcaaggctactcactttccttgtacagtgcatcaagccttctgtggggcactggggatacatcaatgagcaagacagacaatctgtgaatttgtggagtgaccatctcatggggagaaagacaaagcaacaatcctatttcagtcgcaatagctaaaggagcacagaggtgtgtcacctggatttctggggctaaggatggtattctgggggaggtgacctctgaactgaaacctgaaggatgagaaagaatcattcattcattcatccatttaataatttaaatatttcctgagcacccactgtgggccacacactatagtaggcactgaggacacaccagtgacaaatcaaagaccctgtccttctggtcaatgataggaagcaggtgctaaataaacatgaaagtctttactcttttttcattttcttttgaacccacttctttgaggctctcacctccaccatggtactaaaaatgctagtgctaaggtccccaatgaccaccacattgctagaccccatgcacacttctcaggcctcattgactgagcagcagcgtttggtccagtggacatgtattagtttgttttcacactgctataaagaaatacctgagactgggtaatttataaaggaaagaggtttaatcgactcacagttccacatggctgggaggcctcaggaaacttacaatcatggcagaaggtgatggggatgcaggcaccttcttcacaaggctgcaggagagagaagtacaagcaggggaaatgccaacgcttataaagccatcacatctctgagaagtcactatcacgagaacagcatggggggaactgcccccattatccagtcacctccctctctcaacatgtgggaattatggctccctcccttgacgtgtggggattacaattcgtgattagatttggatggggacacagagccaaaccatatcaggtccattccctttgctaggcctctaggcccattctgcctttccttccacctcactggtcactccttttctatctccattgctggttctttctcatcatcccattctctcaactttggagtactctaggactttgttcttagaccccttcgcttttctatctgcactcactgcgttgtatcactggggtccaggcttcaacagatacagtatacactgcctccttctggaattgcagctgctccagcccacatcatcttcctgaacttcagacttgtgtttcaacttcccacagctcatttccacctggggagtctaattgtcatttcatactcaaccatggaagccatgctctatgcattgccatccacagctccgtaaatggcagtcccattcttcagcttgcatagaccaaaacctacacatcacctgctgatctcccactgcacttccagcccatcagcctagcctgttaactctccctgccaaacagatccagaggcaaaccatttctccccaccttcaccataaacatattgtcccctaatcccccatgtggatgattacaataacctaagcaatcatctttccttccttcccaccctgaagtgtaccccagcatggctgcaagagtgaagagtttcaatccgatcacatccctcttctgctccataccttccccaggcctcattttacttggactaaaagccagagtcctcaaggtggctggccaagcaggtgctgctttatccagcccccaccacctttccttcttactcataccattccaggcattctctggccttgagctgtgtgctggttgtctcttctgcctggaatgctcatctcccagatgcccacgtggccatctcccttgcgtccttcacatctctgctcagatgctaccttcttcctgatcaccttcatggaccatccaatttaaaattctgtgcacacccataacactccttatacctgcttccttgctttttctctgtagcacttatcacaatctaacatactacatgttttcttcttattttattgtttgtatttccttacttaaatgaaatctccatgagagatttttgtccttttgctccactgctgaattcccagtgcctataatagtgccctgcacatagtaggtgctcagtaaatgttgactaaatgaatgcataaaatagatgatttcagacaagttctgtaaaattataaagcagaacgagctagagctctggtctccacatgctaaatatggtctccacatcccacgttaggctacttgtgtttaaatagaaatcaactaaaatacatttttaaaatccagtttctcagtcacactagctccatttcaagtgcctagtaaccacacatggctagagactaccctgttgggcagcacaggcctagaatatttccattcccacaagttttccaggtagaggggccagtaagggcagaggccctgagataagattaagagccaggtgtgtttgagggactagccagcggggctagagggtggtaaacacacagcagagtgggggccagatcatgtagggtttgcaggccatggttagaagtttgagttttagtctaagtgatatgggaagccatccatggcttctgagcaaagaaatgatgtcatttgatttctgatttttaaaaatcactatgagttatatttggagaatggactatagaggagcaagaggagagagagaggaggctattgcactgcaagtatcagtgacggtggcctggacaatgatggcagtggtagagatagaagtggatggagtttacatgtatttggaagtagaactgcagtacttgctgataatggaatatgaatctatgagggaaagagaagaagacaaactgagtctagttttggaatcagagcaattgggtagatggtgatgccagtatcttgggtgagcttatgagcagtttggcactgattgaatggtgtggcttgggagccagagttttgtgttaggaaaattggtattgagatgttctgttgcccaagtggagatgtgggttaggcactttgacatataagcctagagcttaagagggaactgggcttagaagcagcctgccaatgataatgaaagcatggacaggctgagatcaccaaggaagtgaatgtagatagtaaagagaagaggacccagggcactgagtcctgcggagaatcaagcagagaaggaggaatcagaaaactctatcaggagaggccagtgaagtaggaggaaacccgaagcatgtggtatcccaggagccaaggggaaaaagtgcttcatgagggaagaatagtcacctgggtcaaaatctactgagatgttggtgtaaataagatgaggacagagaattgacctttggattcatcaagattgaggttgtttggtcactttgttgagtcctttcagtagcagaatgggtgaaaccagtgtttcagagaatcaaggagagcatgggagctgagaaagtgtgggtggtaggcatagacaagtctgagctttgccatgaagtggaacagaagaacagagtgagaggtagagggatgtgctagttaattgtatgtgtcaacttgactgggataagggatgctcagatagctggtaaaaacattatttctgggtgtgtctgtgagggtgtttccaggagagatagcatttctatcagtacaatgaataaagatcaccctcaccagtgtaggaaggcatcatccagttgtttgaggggccaaatagaacaaaaagatggagggagagcaaattctttctctcgctctctctctctctctcgctcgctcattctctctttctctctcttcttgagctgaaacatctatcttctcctgtcctcagacatcagagctcctggatctaaggctttcagactccaaggtgtacaccaatgggccgcgctccccactcctttagctttggattagaagtaacaccataaactcccctggatctcaggcctttgaacttggactgaattattccaccatctttctctattctacagcttgcagatggcatatcatagaatttgttggcctccataatcatgtgtgccaattcccaaaataatatatctatcagctcctactggttttgcttttctggagtgctctgattaatgcaaatgggaatttggagggtttgtgtctgtccgtgtcataggtaaacaaggagagcattcctgagtcctaactaagtcttatggggaaggggtattgtgttagtttcccaggcctgtcataacaaagtactacaaaacgaaagtcttaaacaacagaaatttattctctcacagttttggatgccaggagtccaagaccaaggtgtcaacaggcttggttccttctgagggctgtgagggaagaatctgttccaagcctctcttttttgcttgtaggtggccatcttcttcctgttttacttcacattatcttccttgtctgtgtgtccaaatttcttcttcctatagggacacctgtcatattgtaatggggcccaccataatgccttcatttaactttaattacctttttaaagactatctctaaacaaggccacattctgaggtactggagttaggacttcagcatatggattttggggggaaataaaattcagcccacccataacagtgtttttgttgttttgtttgtttttttgtttgcaataagtcattttctggaacactgagggatggggggattttgtaaccattgctgttttcaaggatcacagggcttgagtaacgttcaacattgtcagcaggcacctggggccaggagcagggcagccagaggtgctagaggccaaagtgctcagaggactgactactgtgtgcaggactgcaggcgtgggaggcaggccctgctctgggctccatgaggaggggatagggtctggaggaagatagtagccttgagagaggctgcccccaaatgctgggtgtctttggatggggaaaagctcagagggcagagtgtaagcccaggcccagagccagccgagcctctggggcccatggctcaggggaccacagcagcaggggaccagagtctgccctgcaggcccagggaagcagccagcaggtgcctctgctttggcctttgcacaacccactgtgggtgaaggagtcggggcctgggtggtggtgccatttgaacaggcaaagagaaaggggagagagaaaaggtcacattcggctctttccaaattatcttgcccagtgggagaggacttgttccctgaccaaactgagggtcgggctgctatttcttgtggcccaataatgagatgcagatgaactggggaggaagagagtttttatttctataactggttacagagagaaaacctggaaaatatcgccagaccaactcaaaattacaaagttttccagagcttatatcccttctaagctatatgtctacatgtaagtgtgcattcatctaaaaagacataagtgattaacttgttttaatctagaactaagatctgagtccggaaggcctccctctggagcctcagtaaattgacttaatctaaatgggtccaggtgctggggtgatgacccttattttgtctcctgctaaatcatggaggtgtggagagttcctttaatctccaataaagcttgtttgtggaggcctggtgagtttcttcagaccttcaataaaatgtgttgaatcctaaatgggtcctgtgaaaaattccttcattactttgtcatgtttcaaggcccaggaaaggtctaggcaaaactcttggtgggcttttcttacattcaagcctttgtataagggtgctggctctttcagcttttaatatttaactttaccactcggtcagtgctgaagcagttgttgtggaggcctgtgttagtgatacctgacctgccacagactgagggctgggaaaagggtggcccccaggggtctcactcttctgtgccaggccctgttcctgtgtctggcagccagagggcccattcccagagcccatctagagccagactgcccagggcgtgaccttcctcctggcaccctgccatgggagtggctgggaaagtgactgctctgtggcgtcttcatcttcagaaaaatgaagctgccacacagctcaccaagaggaggtgatcccaggccaggaacaggtggacgtcgggagtccagaaaggccacagagggtgctggatcctgtgggagaagcagcagggggtcccggccatgcccctaggttggacttgtcattcccaaccaactgcaatgggacatagacttaccttacaaggtagtgaatcgacaggttctcagatgagcctaaaattaagtacaaaatatgctggcccgccacagaccccggggtgctatccatagaaggacagggcacaggcctgaggacggcacccctgtcagtcctctctgctcaggggcagacccgaggatgggacccctgttagttcattctgctcaggtgaaaggcccgaggatggcacttctctcaatccactgtgctgaggaaacagacctgaagacaggacctaactcagtccccactgctaagggaaagagctaaggccacgactctcccagtcttctctgatcaaagccaatgagggagcaggagttttctcagtcctctctgctcaggggacagatcttaggacatgacctcactcagtactctctactcaggagcaattcataaagggacacctctccacatacatgtcactcagcaaacaggagaacaggaactctgttggtcctctcagctcaggggacaggcctgaggatgggacccctgttgggccatcttctaaggggatagataagagaacaggacctctctcagtcccatcaactcaggggacaggcctgagggtgggacccacctcggcccatcttctaagaggatagatatgaggacaggacctcgctcggtcccctcagcccaggggacaggcctgagggtgggacccctgtcggtccatcttctgatgggataaatatgaggacaggacctctctccatcccctcagctcaggggacaggcctgagggtgggactgctgtcagtccatcttctaaggggatacatgtgaggacaggacctctctcagtcctctctgctcaagggacaggactgagaatgtgacccgaatcgttttatcttctaagaggattgatgtgaggtccagacctctctcagtcctctctgctcaagggacggacctgaggatgggacccctctctgtccatcttctaagtggatacgtatgaggacaggacatctctcagtcctctctgctctagacacagacctgagtttgggacctctgtcggtccatcatctgaggggataggtgtgaggagaggaaccctctcagccccctcagctcaggggacaggcctgaagatgcgacccccgtcggtccatcttcttaggggatagatatgaggacaggacctctctcagtcctctctgctcaaaggacaggcctgaggacaggacccctctaagtcctcttttctctacgatagatatgggaatgggacctctctcagtcgactgtgctcagaagacaggccacagcacaggacctctctctgcccactaagcctcaggtacctgaagacagcatctctctcagtcttctctgcccggggacacctctcccactgctttctactcagggtcaggcctgaggacaggaccgctgtcagtcttctctgctaaggggacagaccttaggatgggatccctctctgacctcttacacagaggatgggcctgtggacaggacctctcttatgactctctgcccagggatgggtctgaggacaggactcctctcagtcttcctgctcaggggacgcctgaggatgagacctctcagttttgtttgctcaggggacagactagaagatgggacctctctcagtcctctctgatcagaaagagacctgcgggttgtactctgtcagacatttctgttgttctgcacaggggacacctgagtatgggacctctttcagtcctctttgctcatggaacaggcctgaaaatgagacctctgccatttctctatgatcagggacagagctgaggacagcacctttcccagttcccaccgctcagggtttggagagaggcctgtctgctcaagagacccaactcagtcctctctcgttaaggaacaggtcttatgatggcacccgtctcagttcattttctcagaggtatacctgtggacaggacctctctcactcctctctgctcgagggaaagacctgagaacaagacctctctcagaccactttgatcaggcacaggcctggtgacgggacctctctcagtcctccctgctgaggggacaggccttaggatgggacccctctcagtcttgtctactccgggacagtcctgaggacgggacttctctgagtcctctctgctcagcctcacccccatgattgggctctgatccagctccctcatccaccgctcaagccctctgtgagcccaggaggctgctgcttattggatgggcttggtcagcccttgggcacccaggaaggcaccttgatggacctttctgtccccaggccacacatgccgccctcctcaggggcacttgttgaggactgtgcagcaaaacacaatgcatggtaggagctctgccagctggcacgcaccaagggcctggctgggatgaaggggacaggtggccccccgggggggcccgtccttcaggcccgacaaagtctccttgctctgggctggtggggaagcaactggtttctcccggtacctccttccagactccctggctagatcccttccgggtttcacaacccaactgtccagcctgtgtgctcacatgcccactgacacagtcacacacacattcactcacacactcatgttccagacacactcacatgcgcacacacattgagtgacaaacacacattgaatgacgcattcatgcctgctcattgacacacccacatttgcagtcagcgcacgcacgcacaatgactcacaaactcacacacacactgacacacactgacacactcacagtgtcacacacattcagcgacatgcatgctcaccttcaatggcacagcctcattcccccacaccctcccactcacacacgctcagtgatgcagtcacattctgtcacttggattcacacacattctcagaaactcatgcacatgctcacactgacacacacacgcacacgctcaaacacacccgctcactcacactcacacctgcttgggaatcacggcacacacaggtccactctgaacagggaaaaccaaggagccctgacaggccctggcaaggtcagccaagctctatgccctctcctcttgccctgtccccaaaatctggaggggcccttggaaagtgagcagttgacttggccctgctgagacacaagggacggacatgctggggttgtgcccagcctgaagaaggcagggagaacagagcacagtgggggccccaggcatgcctgcagggcaccccgatgggacacactacaagggtccctgagacaccggttaagcaccttcaggccggggaggctgcaggcccagccccagagacctgccgccccctgcccctccccgacagccccgcaaaactacccctcccatgcctgcactggcctgtgtatgccgagtgtctcccagggcccctgccgccctgcagacctgctgactgcagctccgctcaagcagacaggtcgcctagatccaggattcctcagcccaggtgggcagccacccattcccagcattggctctgaggctgctttgggggagcctggctatcatctgagccatggggatggccggaggctctgtgctccagaacagccggaggaagtgtgtggacacagactgagtgagccccgggagaccctcgccacgtccaagtcaatgatcccgtcccctccccacacatgtgcagggaggggcctatcacttgtcccagttctgtcgcccacagactctgggctagttaaatggctgatcgaggactaccctccatttgtggcgagctccctggcctgttgggagagagagccagtcccaggagggctcaggagggcgggttccaggatcctcaggcccccaccaagaactgcccctctggccacagtgctgaaggaggggtgtctggattagcagcgccgtccatcctgagggagccctcctcaggcagcatccagggctcagagggcctcggggatgcaggacagaaaggggtcactccccagggccatctaggcttcctgctcatggcccactgcctgctcccaggacacaggagtagagcgcctcccagtacactgggaagggagcaggacaggacccaggatgaagtgcagctcccccgcccttcctctccccctccccaagacatgagcacttgggatccctttctcgcccacactctgtccccttggccatcacacacacactgtccccaaacatccctcagtggctaggccaaggctggccacctgcgggctgatctgggaggatgggcacacaccagcccctaccccaccccgagtcctgcacacagctcttcacagggcctctgactgcctgtccaggccctcctggggctcttctctgacctcggttgctggccttggttgcacacgtggcctctctgacccttccggaagccttgagccacacccctacagtgctgccagggatcaggggcctgggacccacctgctgccccttgcccagccttcaatgtccaagtcacttattcctgaggacacctggagtgcctttggtacccagccagtcactgctcatgaccaccagcatcctgttgccaggctccatgcagcccaaggcaccccacaggccctcatagaccctgccccacacacacctcgatgtcagcctggccactgtggccccatccccagcagaccacctcccaccccagtttcacacagcagaggcaagacaccactggaacactgaacaaaatttactgaagagaaacatgaactgaaactgctgaagaaaagggaatctaacacagagagaaactgcaaacagccactacaggtcacaagtccccggcccctccctcagtgtggccccccccaccacatccctccttccatagggccccaggatccacctcttgccaggatggtgggctctggcaatgtgtactcgcttcagggaaccccctcctgagcccacccgctggggcagggccctgccctatagactgcacaggacagtcacaggatgctggaaaacatagcagggaacaccccaccaagttgaggaaactgagtcacgagtaacagcaggggtggaacgccaaagcacaaagcttcctggggagcctcaggcagccctgctccttcccgtgtctggttggtcctcctgcagtcgaggtcacagtcacaaggtgagcgtctgccatgcctccttcccaccgtctcctggaactgcgctggggtactctggaaaggagctgctcagataaaaacacacacatccccaagagaacaagcagccactggccgagatctacaccggcaaagcagaggtggagttcttgacacggaacagcagtgagcagagcccgggcctgatgatgacgcaaaccaaaaacaactacccacccccaacacatcctctcttctcttcttacacttcttcctcctccttcccctcttcctcctccccctcttcctccttctcctccccctcttcctcctgctcctccttattctcctcttcctcctcccgatcatcctcttcttaattctcctcctctttctcttcctcactggtgcaggggcttatgaatgctgccttcctggggctcccctcatgcagtgtagatgatcctaaagacaggctggaccctgtggcctcccctgcggggcttcacttctgccccacagctcttcctcagcagccctggctccttctggcagaggcaggccccaggcaggctcctccaggtcccacgtggcctgggtgccagtgggcatgctcagctcaaagtccacagggtagatatttgggggtgtccagaggaccaggccagagcccccagccacaccttcttcagcccctgcttcgctggggtccccatctgaagcccaggcaccccatgtgctaagtgtagtggttccccgcttgtgtctcctgtacctgttaggggctatgggcccggcccccactgaaccagatgctatttggtcttggttggtgaagtcccttccagctggtggaaagtaagggggcttgatctcgacctggcttccctgtccctctgccccagtcaagttccctgttagtgtaagctgccccttccccttgttcaaatgtccctgctgcctgccaggggaaggagtgcttcggtcttctgagcctatgtttcccagggcttgggatggctcatggccccagcccctgcctcgtttcccaactcctctcctgcagcctgtggcccctccctgcctggagtctggttttcagccttgggatacgtggcctggccatggtcttctcccctagtgctttcactgcctaacagccgcctgcgtttcactaatgggggtaagcctccctgtatggtctgggggctgctgtcgctaaaagaccttgcctgcacggtggcctgaggtgcagagacactggcttctgctcttgcctgtctaccggaggccccccggcctctccctgatggcttctccttattcttcatcactgcctcagtgttctcccactcttcttcatctcgaatgagcttcattaactccagaaaattgggaggacaccctcgctgatccaagagctccagcttgcccctgagggcgggggtcatggcgacccgagctaagagatgtttcagacgaatcatgtctgtgctgcgcactgacaaggggctcttgtgcacggctttctgcagcaggggctctaagcgcagcaggaaagtggagactttctctccaatcttcggagaggtctgcagaaacctaaactgagaggctctaaagtcctctttatccccaaagatctgctttagggcgtcaaggcactgctccacagttatggagtcattgttggcctggagcacccgcatgattgacagagcaggcccacgtaagctctccagcaaacgccgcctcttctccacctcagacacttgccatatgggcattatctcagtgacctgctctagccagtcttcaaaggtctcttcgcctgggctaggggaagcagttcccgaaaacactttcagtttcctgtaccacatactttctttcggaggctctaaaggtggggatctaacttggggcatgacctctgcatccaggctctcggcagggaggctgcaacatcccagggctctggccacatctgtcatacttcggccctcatctttcaggaagtagttcagtctactgagaaactcatcatctgggttacggggttttaccaccacttcccaggagccaccctttcctggtatgtgactgggcagagtagtgtaattgacagtgtcagccagttcaatgaagactgccttggcattgtcttccctcctgaacattctccctaggaccctgtatgcgcacaggggctgtaagcctgccttcacagtgtcctgaatttccacctcactacactccatggggatgcctacaatcagcagggcctttctggggtccatgtccatccccttgcaccaatcctctagcagtgtcagtgccattgctcccactttctatggactgatctaatactagggcagcaatcagctcagtttgacagcactcaaataactctgagccactgccacgtaggaaggcagaagtggtcccaggtttcacacagcctgcaaagcaaatgggatgagagcattgttaatgcccaccccaacctacgcccccaagcacccctcctctgcccccacccccaagcagggatggagtcctttcttcccagggttccccaagtcattttggggagggtagagtgtggaggttctccccaggcaaagatctccccatctcaccactccctgctgacttcctcctgctgtgggttcttcctcaaagtccagaggactctgctgtgtgtgcttcgggtgcctgtagtgaaaaggccaacgtcaggaggcagggcctgacacctggggacactgacgagccctccaggcagaagagggcaggagacagcctcactgctcactcggggctatgtgggctcaggtcacccagcaccctccttgctggagtgaaggctggcagcaagagaggtagagtggccctctttctcaggaatgcctgacggatgagaaagatggctgagctctgcgcaatgcaatgagagtggtgggtgtggagattgtgtgacaagctgcagtgttgccatggatacagagaataccatggaccatgggttgctattgcaggggagtgtcatgtggtaaggccaaggtccttgaaaagcaacaggtgatgtcattggcctccaaccaataaagcgtactagcaaaaaggagggtgggagagggaaggcgagatgggcatgaggagtgagtgctgaaaggacaggagctcatggtttcaattgtgtggaagctgaaatcaggcagaaaagggacccagataaggtccccactgccagactgcaggaaaccaacaactcttgccctagagatggccctaccctgcagagtctgtgaaccctggcaggcagtcccctctccccactctttgccagggttccagagcccctcccaacagggcccaactcacagctgctcaccttgctgggttggccctgctggcagcgcggatgctgcaataacacagccacttcagactcgctctgcttttcaactctatccagttaggcagttcctgactcaggcgtgatgggtcctgcttcactggatctgtccaaggcaaagcagaggtattttgctgtgattctgtcccacacacatgtccctgcccaggccatgccaattcagactctgcataggtgttcactaggaccctggtgcagggatagaagaaactgctcaactgacagagggagcggagcggggggaggagtcgggggacgaatggtgagaggggtgggaggtgaggagggaggtagggggtgggggcaggggggctgctggtagggcagaagggatcctaaggtaaggttgctgccctacccccactgcaaactccattccctcccaagctccgcccctacagccatgttgcaacccttcctaagccccacctcaaaacctgcacccctgctgccaaactctgcctataactaagttgcacctctaccccaagcttagccccccaccaagtctaaccccttccaccacccaagtctaactcgtgcctcaagccctgcccccacccacagtccaactcctaccccaagccctgccccctcaccaagtccaactcctaccccgaggcaagtctaactgatatccccaaatcccctacctccattcccctgctccccccaatccccacccggttatctacatacacccacaccaccgacatcagtggaagcaggcagaatctaggaggggaaggttcgaagccactttccctcaagggcaagggccaagagctactatcctgactgcagtgtctccgggcaggtcaagggtggaataggtctccctgaagtttgtttgtttttctctgaaacggagtctggctttgtcacccaggctggagtgcagtagcgtatctcggctcactgcaacctccgccccctgggttcaagtgattctccggcctcagcctcctgagtagctgggattacaggcgtacaccaccacgcccggctactttttgtatttttagtagaaacggggtttccccatgttggccaggctggtctccaactcctgacctcaggtgatccacccgcctcggcctcccaaagtgctgggattacaggtgtgagccaccgcgcccggccaggtctccctgaagttctgcctggaaatggcagggattccttggcgtgctgggtgtgatctagtgggatcccgcctccagggaaacctatggccaccagcccctagaccccgtggaaaatagcaagagttactggggggttcccccgtaatctgggttgctgtccgagcccggggtccagctccgtacctgccggaggtgcctccaagccggagttcccgcgcagcgcgaccaccacacgtctatggcggctgccgcctccgtgctgactgcgccacgaggctgtggcgggaagaggttgtctggtgacgaccgcccccctaccccatgagcggaactgcacacggcccgctcacggttgcgcactggtgacataaaccctcctacttcctgcaaggtggttcctcaccccacccacccccgtgccgacgacggtggcagccaggctcgccacgtgccatttggcccagcagccactgtggctcttcctcattggaggggagctgtggcgtcccaagcccatgggtgaagggccgggtgcaaatcacccagtgcaacgtataggccacgtgagcgcccttataaacgagtcatagccctcgtttattttttattggactgttctaggggaggagggcaaaaaatacagctactgcctgcatttcacaagggcattagttttttttcgctgctcactgagagccagatgactgaaaatattccattctcccattattctcctgatttcacgaccaaacattacgcacctagtacccaaactgcttcctgtcgtttcccaaagcaggtttcttccacagagggaaggtcctgcggcttgcagcggcccgaaagtactgttccagaaaagggtgtgggtgcggcacaggtagcacacttcaaggtgcacacaaatcccctggtaatcttaaaaaaatgcgtgaagagatctgaggcagggatggttccactgaaagctaggttacttgctgcatatccctgcccaggctgtgtggagcaagggtctgaagcctatgattacatttcagggccagaagttgtggacctttagtgacagaatatatttgtttttctttctctgtgattaaaaaagaaaaggctttttctggtactgttttaataaatatgttaaaagcggacaacattttaaatttatggtcactgagaaagatatttgcagatatcaccttcttcagccaggtgtggtggctcacacctgtaatcccagcactttgggaggccaaggtgggcagatcacttgagatcagcctggccaacatggcgaaaccccgtctctactaaaaatcccaaaatcagctgggtgtgtaatctgagtagctgagtagctgtaatcccagctactcaggaggctgaggcacgagaatcgcttgtacctgggaagcagaggtggcagtgaacccagatcacaccactgcactccagcttgggcaacaaagtgagagcctgtctttttttttttttttttttgagaaggagtctcactctgtcacccaggctggagtgcagtggcgcgatctcggctcactgcaagctccacctcctgggttcacaccattctcctgcctcagcctcccgagtagctgggactacaggcgcccgccaccacgcccggctaattttttgtattttttagtagagacagggtttcactgtgttagccaggatggtctcgatctcctgacctcgtgatccacccacctcgacctcccaaagtgctgggattagaggtgtgagccaccgtgcctggccgagatcctgtctggaaaaaaaaaaagacaattcagagcccattaaatcaatctccttcatgtgacaaggagaaaatagtgctgaaagccattgcttagctgcctggtatcacaacatcacagaaggtgatgttttggaaagaggttctgcctcagtcacctctgggctactgggtgctcccctggccagacgtatacttcaattcattctatttctcactagaagactagcttcctctctctctctcttttttctgtctcagtctgttttgtgcttctataatcaaatacctgagactgggtaacatataatgaacaggaatttatttagctcatgtttctgaaggctgagaactctaagatcaaggggctgcacctgctgagggcctggcatgcaggcatcaagacgtgaaagcatgtgtaagagtgagcaaaagaaagagaagaaaggggcctaaactcattttttaaaaaaaaaatcaggaactcactcccacaataacaaatccactcccgagataacagcatttgtccattcacactggcagagtcctcctcacctaatcacctcttaaaggtcccacttctcaacagttgtattggggattaagtttccaacacatgaactctgggggacacattcaaaccatagcacttttctttaaaaaaagttattggggatagtgacaatgttgaatttttcctgagccctgtgatcctggaaaacagtgaaggttaagaaaccctcagccctttgtgttccagaaaacagcttcctgcaaagaaccctcctttccatatgacttagataagacttaggggatgtcacccgtgtttatgtatgacaatgccagacacgagaccctccaaattgccattctttacttaataaatgataaactgaactgctcgttctcttgtggctgggcgcggtggttcacacctgtaatcccagcactttgggaggccgaggcgggtggatcacgaggtcaagagatcgagaccatcctggccaacatggtgaaaccctgtctctactaaaaatacaaaaattacctgggcgtggtggcacgtgcctatagtcccagctacttgggaggctgaggcaggagaatcgcttgaacctgggagtggaggttgcactgagctgagatggcgccactgcactccagcctggagacagagcgagattaaaaaaaaaaatgcttgttagccaaagtttaggtagcttctcttctttctccagactcctgaaatttggcccacctttagtttgagccagcagataaccttaacaggcccttctcataggctggtcccaggtagaacattctctgatctaatatctggtcattccacatcctcacaccaagttctttctaggcttgtttgctcctccccccgacctctttttttttttttttttaaagctcctttttgcctgacccttgagttgcttgtggaactgacagttggacacccgattgaaacatcccctcccccagttgcaagaagcctttcaaataaattatctctcattaagtcctgtgattcttttcctcccaaactttattaaggtatgattgacaaataaaaatgtatatacttagggcatacaatgtgatgtttgaatatatgtatgcattgtgaaatgattaccacaatgagctaacatatccaccatttcacatagttactttttttgtatgtgtgacgagacacataccttcttaccgaacttacacctgctttcttaccaaacttcaagtacaatacagtattattaactagagtcaccatgctatacattaggtttccaatacttattcatcttatagctgaaggtatgtaccctttgactaatatctccccttttcttcataccctagcccttgataactgccattatactctctgctctgttactgtgagtttcactttctttttcattttctttttttttgatggaatctcccactgttgcccgggctggagtgcaatggtgcgatctcggcttaatgcaacctctgactcctgggttcacgcgattctcctgcctcagcctcctgagtagccggaattacaggcgcacatacactaccacacccggctaatattttgtatttttagtagagacggggtttcactatgttggccagactggtctcaagctcctgacctcgtgatccgcacgcctgggcctcccaaagtgctgggattacaggtgtgagccaccacgcctggcctgacgttcactttttaaagatttcacatatggctggctgcagtggttcacatctgtaaccccagcacttttggaggctgatacaagaggatgccttgagcctgggagttcgagaccagcctgggcaacataaggagacccctgtctctacaaaaaaaatttaaaaagtgtctgggtgtgatggcacatgcctgtggtcccagctactcctgaggctgaggtaggaggattgcttcagctcgggaggttgaggctatactgagctgtgactgcactccagcctggccaacagaatgagaccctgtctcaaaaaacaaacaaaaaaagatttcacatacaagagcatgcaatgtttggcttcctgtgtctggtttatttcacttagcataatatcctcaaggttcattcatgttattgccaagggcagcatttccttctttttttaaggctgcttgtgaatatatatatatatatatataaataaaacatatataaaacatatatatgttatatatataacatatatatgttatatatataatatgaatatataatatatgatatgaatatatagtatattcatattatatataatatatataataaagaaaattatatataatatatataatatataatacatatactatataatatatataaaatatatatataatatatataaataatatatatataaatatatgttatatatattatatataaaatatatataaatatatattatatatattatatataatatatatataatatataatatatataatatataaaatatatattatataatatatattatattatatattaaatattatataaaaatatatataagacatttatatataatatattatatatattatatataatatatataatatagatatataaaaaacattttctttatccattcatctgtcagtggtcacttaggttgttttcttatcttagctattgtgaataatgctgaaatggacaagagagtccagataccacttagagatagtgattttatttgcttaggatatctatccatagtggaattgctggatcatacagtagcatacatggacaattaattttcaacaaagctgccaagaatacacaatgaggaaagtgagatggagcagggaccccgtctcaggggtctgcaggcccccttaagcatataaataaaggaaaatgttgagttctttcaggggcaatgccaggcacctagctagccctgagaagtaaataagcaagttgataagcaagaaggtaatagcttaaaacaacagccaaggaagctacaatcacaggatgttttctttccctatagaaactaaagataacatgttaacatatatctctgagttgtttttcagaaacttggatccccaccaaactgatcagctggcatgcagaccccagaaaagggggagctgaggactgaactctgaccaccactctttgttccaaacttcttcatgaggggcctggaggaaatcacatccatctgtcagagctaatattcttttctgctgacccaaaaattttaaacaaagcttctcttgcttaaccaactgcaaaccaaaagacctttgaacctacttatggcctgtaagccctcacttcaagatatcccacccttttaggccaaaaccaatgggtaacctctgtgtaatgatttatgaattagcctgtaacttctgctttcctgaaatttactcctacctttaaaagcccttacctgcaagccatcacggagctctggatttgagcgttagctgcctgatcctccttgcttagtgccctgcaaataaatgtcttcctttccaccactgcaaacctcagtgtggatatctgatcttactgtgatgggcaagacaactccagttcagttcaataacacttggccacaactcaaaagccctgagtgggtgtcttgccaatagcatatcagcccctggctatgagcacccttggaccctgtccagtagctgcctgaattattttattcagggatggatctgtgtatttggctgccaccaaggcatcactggcttgtgttgcttttacttttgcagcattagaaatgagacacttggctgggaagacattttttggcaggtgacaaatttgtgggcaatagccccaaggtatattttcttcaaacactacgttctgcattggcaggacatctggccttgctttggcaatttacgggactctgcttcatcatagtgtgtttagtagggaatactccataagcaactgaagggatggagactttgagaaatcacattttgattttgatttgcttgcttgacaatctgcctaaagcccagctgaggcattaagggtttttcacctaaggtcttgtcatctaaaatggaaactacaaattatgttcctccttgtagcccattatggtgcattctgcagaatcgggccatttttagctttgagcccatgaaaaagaaaaatgtttttaatgttgaaattctgcctgaccacggtatcccctaggatccagggaatggtagccagaatttagatatctaaattacattataatttttcaattagaattgttttgtgaacaagaaggtaaatgggatgaaattctgaatgtacaagcttttatgcttttgtaccaaagtgagctaattcaaagaaggtataatttgcatagaatcat

SEQ ID NO: 6041 - DNA, 1477 bp, Homo sapiens
ccgtgatctcggctcactgcaacctccgcctcctgggttcaagcgattctcctgcctcagcctccggagtaactgggagtacaggcatgcgccaccacgcttggctgatttttgtctttttagtaggggcggggtttcaccatgttggccaggctggtctcaaactcctgacctcaggtgatccacccacctctgtctcccaaagtgctgggattacaggagtgtgccactgcgcctgaccagctttataaagtttatagggacagtgtcaccactttacagaagagggactgaggctctgaggaggaagttccttgccagggtccgagtgtcgccaccctgagaactccagcacccacctccctactctccctcatggcgtctcccccacctttccacagccagaagttgccaggtgaatacttccggtacaagggcgtccccttccccgtcggcctgtactcgctcgagagcatcagcttggcggagaacacccaagatgtgcgggacgacgacatctttatcatcacctaccccaagtcaggcacgacctggatgatcgagatcatctgcttaatcctgaaggaaggggatccatcctggatccgctccgtgcccatctgggagcgggcaccctggtgtgagaccattgtgggtgctttcagcctcccggaccagtacagcccccgcctcatgagctcccatcttcccatccagatcttcaccaaggccttcttcagctccaaggccaaggtgatctacatgggccgcaacccccgggacgttgtggtctccctctatcattactccaagatcgccgggcagttaaaggacccgggcacacccgaccagttcctgagggacttcctcaaaggcgaagtgcagtttggctcctggttcgaccacattaagggctggcttcggatgaagggcaaagacaacttcctatttatcacctacgaggagctgcagcaggacttacagggctccgtggagcgcatctgtgggttcctgggccgtccgctgggcaaggaggcactgggctccgtcgtggcacactcaaccttcagcgccatgaaggccaacaccatgtccaactacacgctgctgcctcccagcctgctggaccaccgtcgcggggccttcctccggaaaggggtctgcggcgactggaagaaccacttcacggtggcccagagcgaagccttcgatcgtgcctaccgcaagcagatgcgggggatgccgaccttcccctgggatgaagacccggaggaggatggcagcccagatcctgagcccagccctgagcctgagcccaagcccagccttgagcccaacaccagcctggagcgtgagcccagacccaactccagccccaaccccagccccggccaggcctctgagaccccgcacccacgaccctcataataaacacgtcgattctgtctaaaaaaaaaaaaaaaaaaaaaaaaaaaaa

SEQ ID NO: 6042 - DNA, 404 bp, Homo sapiens
aaaagttggttaaggcagcaggattttcatcttccacaacttctaccagctgggaaggaaacagagcctcacagaccctctcattccaagaaattgcccttcttaaagctgtactggtggctggactgtatgacaatgtggggaagataatctatacaaagtcagtggatgttacagaaaaattggcttgcattgtggagacggcccaaggcaaagcacaagtacacccatcctcagtaaatcgagatttgcaaactcatggatggctcttataccaggagaagataaggtatgccagagtgtatttgagagaaactaccctaataactccttttccagttttactttttggtggtgatatagaagttcagcaccgagaacgtcttctttctattgatggctgg

SEQ ID NO: 6043 - DNA, 469 bp, Homo sapiens
  misc_feature (1)..(469): n=a,t,g or c
cggtnacaagctactgcatcttatgatactcgagtatatatctgggatccacataatggagacattctgatggaatttgggcacctgtttcccccacctactccaatatttgctggaggagcaaatgaccggtgggtacgatctgtatcttttagccatgatggactgcatgttgcaagccttgctgatgataaaatggtgaggttctggagaattgatgaggattatccagtgcaagttgcacctttgagcaatggtctttgctgtgccttctctactgatggcagtgttttagctgctgggacacatgacggaagtgtgtattttnggggccactccacgggaggtccctagcctgcaacatttatgtcgcatttcaatccgaagagtgatgcccaccccaagaagtccaggagntgccgattcctcccaagnttnnggngtagatccannttggntangttnaann

SEQ ID NO: 6044 - DNA, 448 bp, Homo sapiens; identical to SEQ ID NO: 5430
  misc_feature (1)..(448): n=a,t,g or c

SEQ ID NO: 6045 - DNA, 2063 bp, Homo sapiens
tggcccatgctaccctcacctgacacctgcttcctacctctggtttctactttgcaggtgtgtatcaggtgtacacagaccaggtagaggtctgtggagagggctgcaggccaggctgcagggaaggggtgccaggcggggctagagcaacaagggcagaggctacactgaacctgggtcttaagggtcccccaggctggggctgggtggcctatgtgaaccccagaggcacagccaggacatgggggctcatcagaggggcagtctgagctcagcaggaaaggccttctctgtcagagctgtcccaggaccactggacatggctgaggaacagtgagttccccagtgttggaggtgtgcaagcagaggcctggccatcgtcctcagacagagctcccagatccagctccctgcccgtctgccatgttcctgccagctgcctccccactgggccctttaccacgttcctgactcacacggccggttctgccaccgcccagaagccggtgcccaagggcctggctataaatccttgatgtgaggctggctacctctcatcacttctgagcacggagcaatggcctctcgctgggctgtgcagctgctgctcgtggcagcctggagcatgggctgtggtgagtgggccgcaggctggtggggaccctgcctctgagcttgtctgcccacctcctagggggatggggctgttgggggtgctttgtggctgagagcctccttaggcctccatgaggctcaccctcctcattctcagtgagcctcctgggtcccagagcccagcttcaccctgggacaggggtcacggctccactctgcaggaagggagactgaggcttggtggagggatgcagcattcaagtctgtggctcagctcagttagagaaagctgccagagaggccccttgaagggctgcccggggccttgaaagatgtcagcgagactccttcagcccctgcctcctggttccaggatgaggccaccgaggtcaggtgatgaggttctgcccccatccctcacccaggtgaggccctcaagtgctacacctgcaaggagcccatgaccagtgcttcctgcaggaccattacccgctgcaagccagaggacacagcctgcatgaccacgctggtgacggtggaggcaggtgaggccaggccccacggcagccctgggtgcactggagtcagggccacctcccccaagtgcctccctcctttgctggtgctcctcccggcccaaaaggcagcaggtgggatgggcagaacaggctgccacaccttggcaggggtgccttccacgagggtggcacagccccctcagagacccagtcctggggcaccaggcgctggaggtgggtggggcttaatggccggggtaccctggggggctcaaaccccagctctgacacagacccactgggtggtgttgccacagcctctgggctcgggctcccatctcagcgcaggcacttcagaggtctgacaaggcctaataattcatgaacaggtcacagtcagaggagggctgggccctgggtggcttcacagatgtggactattgggaacagggatcacagggagggtgaggtcaggcgacggcggctgggagcagtgcagcagcaggcaggcgctgcaggggagtgagggttctgacactggcccaccctgcagagtaccccttcaaccagagccccgtggtgacccgctcctgctccagctcctgtgtggccaccgaccccgacagcatcggggccgcccacctgatcttctgctgcttccgagacctctgcaactcggaactctgaacccagggcggcagggcggaaggtgctcctcaggcacctcctctctgacggggcctggctccacctgtgatcacctccccctgcttcctgctgctgtggcacagctcactcatggggtctgaggggagagaagcacaccaggggcgccctctgccttccataccccacgcttataaaacataactaagccaagagtggacatgacttttgtccttcctgggcactgacaacctacagaactgg

SEQ ID NO: 6046 - DNA, 4039 bp, Homo sapiens
tgccaaggctccagcccggccgggctccgaggcgagaggctgcatggagtggccggcgcggctctgcgggctgtgggcgctgctgctctgcgccggcggcgggggcgggggcgggggcgccgcgcctacggaaactcagccacctgtgacaaatttgagtgtctctgttgaaaacctctgcacagtaatatggacatggaatccacccgagggagccagctcaaattgtagtctatggtattttagtcattttggcgacaaacaagataagaaaatagctccggaaactcgtcgttcaatagaagtacccctgaatgagaggatttgtctgcaagtggggtcccagtgtagcaccaatgagagtgagaagcctagcattttggttgaaaaatgcatctcacccccagaaggtgatcctgagtctgctgtgactgagcttcaatgcatttggcacaacctgagctacatgaagtgttcttggctccctggaaggaataccagtcccgacactaactatactctctactattggcacagaagcctggaaaaaattcatcaatgtgaaaacatctttagagaaggccaatactttggttgttcctttgatctgaccaaagtgaaggattccagttttgaacaacacagtgtccaaataatggtcaaggataatgcaggaaaaattaaaccatccttcaatatagtgcctttaacttcccgtgtgaaacctgatcctccacatattaaaaacctctccttccacaatgatgacctatatgtgcaatgggagaatccacagaattttattagcagatgcctattttatgaagtagaagtcaataacagccaaactgagacacataatgttttctacgtccaagaggctaaatgtgagaatccagaatttgagagaaatgtggagaatacatcttgtttcatggtccctggtgttcttcctgatactttgaacacagtcagaataagagtcaaaacaaataagttatgctatgaggatgacaaactctggagtaattggagccaagaaatgagtataggtaagaagcgcaattccacactctacataaccatgttactcattgttccagtcatcgtcgcaggtgcaatcatagtactcctgctttacctaaaaaggctcaagattattatattccctccaattcctgatcctggcaagatttttaaagaaatgtttggagaccagaatgatgatactctgcactggaagaagtacgacatctatgagaagcaaaccaaggaggaaaccgactctgtagtgctgatagaaaacctgaagaaagcctctcagtgatggagataatttatttttaccttcactgtgaccttgagaagattcttcccattctccatttgttatctgggaacttattaaatggaaactgaaactactgcaccatttaaaaacaggcagctcataagagccacaggtctttatgttgagtcgcgcaccgaaaaactaaaaataatgggcgctttggagaagagtgtggagtcattctcattgaattataaaagccagcaggcttcaaactaggggacaaagcaaaaagtgatgatagtggtggagttaatcttatcaagagttgtgacaacttcctgagggatctatacttgctttgtgttctttgtgtcaacatgaacaaattttatttgtaggggaactcatttggggtgcaaatgctaatgtcaaacttgagtcacaaagaacatgtagaaaacaaaatggataaaatctgatatgtattgtttgggatcctattgaaccatgtttgtggctattaaaactcttttaacagtctgggctgggtccggtggctcacgcctgtaatcccagcaatttgggagtccgaggcgggcggatcactcgaggtcaggagttccagaccagcctgaccaaaatggtgaaacctcctctctactaaaactacaaaaattaactgggtgtggtggcgcgtgcctgtaatcccagctactcgggaagctgaggcaggtgaattgtttgaacctgggaggtggaggttgcagtgagcagagatcacaccactgcactctagcctgggtgacagagcaagactctgtctaaaaaacaaaacaaaacaaaacaaaacaaaaaaacctcttaatattctggagtcatcattcccttcgacagcattttcctctgctttgaaagccccagaaatcagtgttggccatgatgacaactacagaaaaaccagaggcagcttctttgccaagacctttcaaagccattttaggctgttaggggcagtggaggtagaatgactccttgggtattagagtttcaaccatgaagtctctaacaatgtattttcttcacctctgctactcaagtagcatttactgtgtctttggtttgtgctaggcccccgggtgtgaagcacagaccccttccaggggtttacagtctatttgagactcctcagttcttgccacttttttttttaatctccaccagtcatttttcagaccttttaactcctcaattccaacactgatttccccttttgcattctccctccttcccttccttgtagccttttgactttcattggaaattaggatgtaaatctgctcaggagacctggaggagcagaggataattagcatctcaggttaagtgtgagtaatctgagaaacaatgactaattcttgcatattttgtaacttccatgtgagggttttcagcattgatatttgtgcattttctaaacagagatgaggtggtatcttcacgtagaacattggtattcgcttgagaaaaaaagaatagttgaacctatttctctttctttacaagatgggtccaggattcctcttttctctgccataaatgattaattaaatagcttttgtgtcttacattggtagccagccagccaaggctctgtttatgcttttggggggcatatattgggttccattctcacctatccacacaacatatccgtatatatcccctctactcttacttcccccaaatttaaagaagtatgggaaatgagaggcatttcccccaccccatttctctcctcacacacagactcatattactggtaggaacttgagaactttatttccaagttgttcaaacatttaccaatcatattaatacaatgatgctatttgcaattcctgctcctaggggaggggagataagaaaccctcactctctacaggtttgggtacaagtggcaacctgcttccatggccgtgtagaagcatggtgccctggcttctctgaggaagctggggttcatgacaatggcagatgtaaagttattcttgaagtcagattgaggctgggagacagccgtagtagatgttctactttgttctgctgttctctagaaagaatatttggttttcctgtataggaatgagattaattcctttccaggtattttataattctgggaagcaaaacccatgcctccccctagccatttttactgttatcctatttagatggccatgaagaggatgctgtgaaattcccaacaaacattgatgctgacagtcatgcagtctgggagtggggaagtgatcttttgttcccatcctcttcttttagcagtaaaatagctgagggaaaagggagggaaaaggaagttatgggaatacctgtggtggttgtgatccctaggtcttgggagctcttggaggtgtctgtatcagtggatttcccatcccctgtgggaaattagtaggctcatttactgttttaggtctagcctatgtggattttttcctaacatacctaagcaaacccagtgtcaggatggtaattcttattctttcgttcagttaagtttttcccttcatctgggcactgaagggatatgtgaaacaatgttaacatttttggtagtcttcaaccagggattgtttctgtttaacttcttataggaaagcttgagtaaaataaatattgtctttttgtatgtcaagcgggccgccaccgcggtggaaactccagctt

SEQ ID NO: 6047 - DNA, 3130 bp, Homo sapiens
cagaatccaggggacggttgctgagcgggcctgggacagcgggtcgcggcacctccggcctgcgcgtgtctaatccgtctgtcgggtcccgaaagacctaagccgagcctgcgccggacgggtgggactggactgagagaattctctgagctggtgacaggtgccacaggcactggggatctcaccagaaaggaaccgacggagctaggggccagcgagatggcggacgaggccttagctgggctggatgagggagcccttcggaagctgctggaggtcacagcagatctggcagagcggcggcgcatccgctcagccatccgggaactgcagcggcaggagctggagcgcgaggaggaggccctggcatccaagcgtttccgtgccgagcggcaggacaacaaggagaactggctgcactctcagcagcgggaagctgagcagcgggctgccctggcacggctggcagggcagctggagtccatgaacgatgtggaggaattgactgcactgttgcgaagcgctggtgagtatgaggagcgcaagctgatccgagctgccatccgccgtgtacgggctcaggagattgaggctgccaccttggctgggaggttgtacagcgggcgtcccaacagtggctcaagagaggacagcaaggggctagcggcacacaggctggaacagtgtgaggtgccagagcgagaggaacaggaacagcaggcagaggtttcaaagccaacccccacccctgaaggcaccagccaggatgtgaccacagtgacactcctgctgcgagccccacctgggagcacatccagctcacctgcctcacccagcagttcacccacccctgcctctcctgagcctccattggagcctgccgaggcccagtgccttacagctgaggttccaggcagcccagagccaccccccagcccacccaagaccaccagccctgagcctcaggagtctccaacgctccccagcactgagggccaggtggtcaacaagcttctgtctggccccaaagagacccctgctgcccagagcccccccagaggcccctctgacaccaagagagcagacgtggctggaccccgaccctgccaacgctccctgtcggtgctcagcccccgccaaccagcccagaaccgagagtccaccccccttgccagcggaccttcctcattccagcgggctggctctgtgcgggatcgtgtccacaagttcacatctgattctcctatggctgctaggctccaggatggcacaccccaggctgccctaagtcccctgaccccccgcaaggctcctgggcccctccctcaccagcaccacccctgcgtcctcctccagcggctcctcctctcggggcccagtgatacctcctcccggttcagcaaggagcaacgaggagtagcccagcccctggcccagcttcgaagctgcccccaggaggagggccccagggggcggggcttggctgctaggccccttgaaaacagagcaggggggcctgtggcacgttcagaggagcctggtgccccgctgcccgtggccgtcggcactgccgagccaggggacagtatgaagaccacattcaccatcgagatcaaggacggccgtggccaggcctccacaggccgggtgctgctgcccacaggcaaccagagggcagaactgacactggggctgcgggcgcccccgaccctactcagcaccagtagtgggggcaagagcaccatcacccgtgtcaacagccctgggaccctggctcggctgggcagtgtcactcatgtcaccagcttcagccatgccccccccagtagccgaggaggctgcagcatcaagatggaagcagagccagcagagcctctcgctgcagcagtggaagcggccaatggggctgagcagacccgagtgaacaaagcaccagaagggcggagccctctgagcgctgaggagctgatgactattgaggatgaaggagtcttggacaagatgctggatcagagcacggactttgaagagcggaagctcatccgggctgcacttcgtgagctccgacaaaggaagagagaccagcgggacaaggagcgggaacggcggctgcaggaggcacggggccggccaggggaggggcgcggcaacacagccactgagaccaccacgaggcacagccagcgggcagctgatggctctgctgtcagcactgttaccaagactgagcggctcgtccactccaatgatggcacacggacggcccgcaccaccacagtggagtcgagtttcgtgaggcgctcggagaatggcagtggcagcaccatgatgcaaaccaagaccttctcctcttcctcctcatccaagaagatgggcagcatcttcgaccgcgaggaccaggcgagcccacgggccggcagcctggcggcgctcgagaaacggcaggccgagaagaagaaagagctgatgaaggcgcagagtctgcccaagacctcagcctcccaggcgcgcaaggccatgattgagaagctggagaaggagggcgcggccggcagccctggcggaccccgcgcagccgtgcagcgatccaccagcttcggggtccccaacgccaacagcatcaagcagatgctgctggactggtgtcgagccaagactcgcggctacgagcacgtcgacatccagaacttctcctccagctggagtgatgggatggccttctgtgccctggtgcacaacttcttccctgaggccttcgactatgggcagcttagccctcagaaccgacgccagaacttcgaggtggccttctcatctgcggagatgctggtggactgtgtgcccctggtggaggtggacgacatgatgatcatgggcaagaagcctgaccccaagtgtgtcttcacctatgtgcagtcgctgtacaaccacctgcgacgccacgaactgcgcctgcgcggcaagaatgtctagcctgcccgcccgcatggccagccagtggcaagctgccgcccccactctccgggcaccgtctcctgcctgtgcgtccgcccaccactgccctgtctgttgcgacaccctcccccccacatacacacgcagcgttttgataaattattggttttcaacg

SEQ ID NO: 6048 - DNA, 403 bp, Homo sapiens; identical to SEQ ID NO: 2107

SEQ ID NO: 6049 - DNA, 273 bp, Homo sapiens; identical to SEQ ID NO: 3359

SEQ ID NO: 6050 - DNA, 397 bp, Homo sapiens; identical to SEQ ID NO: 3362

SEQ ID NO: 6051 - DNA, 433 bp, Homo sapiens
gagtttccctttgtttatttttgcagccaacaaagtatgttttcgaggttaacaacgaagcacaggatagtacaagtggaagatcattaacatgactggataggaacctcttttaatttcccttccttggctttttccacaccctaggtggattacactcaccctgacacacctagaaaatacacccagataccagaattgcaaaattcaggaagaatgcactgcacactgtatccaggcaagccaagctcacctaaaaatggtctcaaaaagcaaagggctctgaccatcgactgatggggttgcaagcccagcctgtctgcaggaatttttaaatctgaaaccacactacagaaattattttatatattacttatttttaaaactcaactgtaaaaataagtgttacaggaagagtgaggaagagggaatt

SEQ ID NO: 6052 - DNA, 405 bp, Homo sapiens
ttttttgtttttttcactacaaagtcctttattaacaagtcaataaaaaagaagagagagagatgtcaaaatactttccttggaggccccaggagggagaggcactgtcaggactcacctggccagggaaggcaaccccaccagaggcagaacggaggtcaggggggcagctggcccaggaagcctttggggaatggctcaggcctcaggcagggactgtgcaaacgccgaggctgcgcagggagtgatgggttgggggcttaagccggagcaccgtgttcccctgcatgggcagacacgcagtcaggctagcacctgcccactccacctgtgagtgtacacaggtgtccgcgtaaaagccggtgcctgcacgcagcttacatacagagagcggaacgagggtcc

SEQ ID NO: 6053 - DNA, 503 bp, Homo sapiens
tagtttagaaagaaatgtttttaatataatatttaaacatattaaaaaaaagcaacaattcaataaggatccttccattgttctttatacagatttaaatgctgtcacgtactttatcagttacatttataattaataaccttccaatcactgagtttagaaattgcagtatttactgagctaacctttctcacaaagtaaggcacaactacatgatcacaagtagtaaacacaatacaaataatgaacccaagaactaaatgagaaaatgttcatgcataagtatctacagaacttatgaatatatgatccagttcaaggaattacagaatgtcatatacacaactgcattgtgttacaataaatttattacttctacacagaaagaacttagtgacttctaattctattttatacaattttacataaatttagtaagtttatgcacaatattcacatctgcaacaataacaaattgatcattaaattcaggctaagggcaa

SEQ ID NO: 6054 - DNA, 451 bp, Homo sapiens
ccatcacagctatttacaaataactttggggtgctctcttgattttagtcagttcattatattgggggacagagggctgctggaatgtaggaaactggatggaatgcagaaatataaataagaccaacgttccacaaaccaaagtgtcaatattgcctccccagaaaagttgtgtcctaaaagcacctgtttttcgcttttttttggaatcatatataccagaaacattactgagacctaaactaccgcacaccaaagaggatagaaaataactcaatatttatattaaaataaagtgtttaaccacaaaaaagcagtaataaaatagtttcctaatttacaatttgcatccaaaggatgaataacaactcactaataaataatatttatataaatattttgtatgtcgaaaatagttttttaaaaggcaatggtctcaagaacctctcga

SEQ ID NO: 6055 - DNA, 477 bp, Homo sapiens
ttttttttcgtgacacaaacatgcattcgttttattcacaaaacagcctggtttcctaaaacaatacaaacagcatgttcatcagcaggaagctggccgtggcaggtggggcccaggcctcaggggtgcgctgtgggacccactcctccacctagcaggggaccacgcaaagaagccctttcttctgttgccattagcaaggccagaaaaaaaggacttattttctctaagaaaagtagccaggattggaaatatcgagatggggctccccagatcgcaatggataaacgaacagaactttcatttttttttccaaaatcactgtttggggtgggggatcccagtctcgggactgtgaggtgcagctcagctggcctggtgctccctccccttctgtgagctccctgctggcagctctgcacgcgtggatggatacagagcggcttctacacggcgccatcaacattctctttatga

SEQ ID NO: 6056 - DNA, 437 bp, Homo sapiens
tttttttagggttagaaactaacttcattctttttagaattcaacagttttcctaggtcaccaattccaccttttgttcttattaaggcgcaaagtcacaggacccccttcctgggagtcactgtcattaaatctattgccgtcagctcagcccagggtaggcaaggttcaagaatgggaagtgcttttgtctggggaaacacgcaggtaatgtgatgctaggaaggaggatgtgcaggtgggtgagagcccaggagggagcagctggtgcctgacagggtgagccatcagggctgggcctgggtacagccccaggagaaggagcctgtgcagaagtagcagttcagtggattccacctcctatgtcacaatccagcaggtggccaggactcagcctgggttttaagtgagtaatgccttccctgtctcagagatta

SEQ ID NO: 6057 - DNA, 607 bp, Homo sapiens
ttttgatatcttaccatttattataattgcgcacattagtgtggattaagtatgattagaaacactaagcaattgaaaagaagcaaaaaggtaatgcatccctcttcctcagatctgcaaaattctgtgcctttttagacatgagagaggctgttttggatctaagtcaataatggctcttgcaagatttctttcaatgtcttgcatgttggttctaaaactcccttaaaggcagactataccttgaacgggggaagccagcctatcttgggcctctttaccttgcctttcatccactggtcctgcactgagactcagggatagcacctctcaccaacggggtgacttttatttccttcactcattcattgagtgcctgtgtgttagtgtccaccacgtgccaagtctgatgttggggactacagctgaggaagagcagttggtatttagtgtgggtacatgccctccagaggaaatccactacaaataaatggaatgttcctctctgatcatttggcaggaagaacaagcccacaagccaatgtgcatagggctcagaaactggagaaagacgtagacattttataattaaatcaaaagcagaggc

SEQ ID NO: 6058 - DNA, 424 bp, Homo sapiens
tttttttttttttgcagaataataataattattataataacagtatcatacatcaaggacaaacccagctgccccaagcctactgcaaaatctgtatgtacagtatagtctatgtgggtggggtacagggctgcctgcctgcaccctcaaggccttactcataccagcttcctgaggaggggccggcccctcctcttgcccctgttgaagcttggcacaggctggggaggctggcactgccaacgccatccctccatgttgggcaagcctgttccaaggggctggactcacctcccccattgtggcctggctgcaagggattgggggtgagcttgttgagggacaaggcggtggcagctgtggggtgtgtctcatctgagtcccctttccacccctaccggctcttcctgcgggcctgccatgg

SEQ ID NO: 6059 - DNA, 328 bp, Homo sapiens; identical to SEQ ID NO: 2829

SEQ ID NO: 6060 - DNA, 403 bp, Homo sapiens; identical to SEQ ID NO: 3215

SEQ ID NO: 6061 - DNA, 421 bp, Homo sapiens; identical to SEQ ID NO: 4740
  misc_feature (1)..(421): n=a,t,g or c

SEQ ID NO: 6062 - DNA, 441 bp, Homo sapiens; identical to SEQ ID NO: 3630
  misc_feature (1)..(441): n=a,t,g or c

SEQ ID NO: 6063 - DNA, 491 bp, Homo sapiens; identical to SEQ ID NO: 5132
  misc_feature (1)..(491): n=a,t,g or c

SEQ ID NO: 6064 - DNA, 237 bp, Homo sapiens
tttttttttttttttttccagcaaatgagttgacttttattaagttctgacagtgggccacacacgatgaaggtgcccgcatgtgtgttcttctatgaacgccctcctccctccaaccctgggcattggcctcactatttccattctagaaaaggaaaccgagctgcagagcagagggggaactggcccagtgccgtcgagctggggcaggtggctggagttgaggactaggaactg

SEQ ID NO: 6065 - DNA, 543 bp, Homo sapiens; identical to SEQ ID NO: 38

SEQ ID NO: 6066 - DNA, 433 bp, Homo sapiens
ttttttttcagatttacaagtttggatgctttattacctaaagtcaaaggggaagatacaaaagctgtttaatttaccaagcaagtgcagcacgcctatggaaagctttggccctttttgctaagctgtcagatattcgaggcagctggccagacggctgtgttttaaatccaggcttaacattttcgaggctgctgaataatgtagatccttttcagtggaacaaccttttccagagcaggtgtgggtttttgatgcgccatgtgcactgttgctggaaatttatagttgagcttctccagtgtgtcattcagggcatccagtgtctgtattttggcaacatttgcaatggcacttgttttctcgaatcctgtttttttggtatgtctttccaaggtgccaatttcttgttttttggaaattctcattcctc

SEQ ID NO: 6067 - DNA, 404 bp, Homo sapiens
  misc_feature (1)..(404): n=a,t,g or c
ttttctgtggggggtttatgtatttattcattaaaagatctgtaaacaacattttatacaaatcttgattcttttacaaaaatatccagaattcctaacactttacagaaaacacaacagacctaaggaaatgaagcagcttcaggctgcanggatgaagacaccattgctgaagcaaaggtctcctcctagagggatagccaggatccatcacagtaaacccttttacccccattttataaacatccaattattaactgttcctgctgggttggagtgtaagaagagaccaaatggagagatgtctagtagaagccccactgggggtaacctgcttaacattaaaaaaaagacaggctcagttctattccctggacccacatctgtaggaattatattataca

SEQ ID NO: 6068 - DNA, 481 bp, Homo sapiens
tgaaatgtatccggtattttactattacaaacaaaaatccaatgaacattcttgaagacatacacaaaaataatggttacaatagaagttactggaattgaaattttggttcaacctatattaaaatgtaaggcttttgatatagctaatagatttttgaaatgatcagtcttaacgtttgtaggggagcacactcctgcatggggaaaagattcactgtgaagcacagagcacctttatggttggatcatcttgtcattaaagttcaggcgttatctatcctgtaagtggcagaatcaagactgcaatatcgcctgcttttctttttaactcatgttttcccttgactacactggtcctcaaagtaaaacccctgtgtcagtgtactattcatggaatactctgcaattataaccaccttctaatacttttaatacccaatcaaaatttattatacatatgtatcatagatactcatctg

SEQ ID NO: 6069 - DNA, 420 bp, Homo sapiens
  misc_feature (1)..(420): n=a,t,g or c
agggaaacagcatcttttaatgttttattgttcacttgcaaaaatatatataatatatattacatgtatagcatgtatagnngngccccacagcttgagtcagagaaagctaacagaaaggcacatatggaggcatgtcttttcatacaatattcagttaagccaacattcaggccatggcaagtgacagttaggacaaggacaatatagcacacctgtgttcacgattccaaagagctaactcagaggcaactcttaaggtctgccgagaatggaaggtcatcttgggagaaaatatcacatctacttaatatggcctgtcaggcattcagagaatatattnaaatctggaaaaagacaccagggcaaggtgaaagccagtccttgacttgacagctagtttgttcttctcccctttta

SEQ ID NO: 6070 - DNA, 310 bp, Homo sapiens; identical to SEQ ID NO: 4791

SEQ ID NO: 6071 - DNA, 524 bp, Homo sapiens
  misc_feature (1)..(524): n=a,t,g or c
tgtgtgatcgcacttatttaacatttattttgagttagggtgtgagtgctggggcaggtggctaaccatcccctgccctctgtggtggcctgagagagaagcaggaatgccccgtgcaggttggggatcagcaaacagtctagaccagcttctctcctgtatcccgtttggagagtccctgggtcaggggccagtccatcctgcagcattgaagggcgtgaggaatgagcagggctgtggggctcacagagcaggcagctctgggggagaggagagggggatgtgctggagcccggagtccatgtctggcagccttgggagatggagagggtttcccaggccggacagcatgggcggggggttcattccatggtgantctccctgctccgtgttgtccaagtttgtacgggaggccaccagcgcccttcattcggtacatcgatggacaacatggccttgattgcagggaattgttgcaggagaatcggcgaacagttcttggtgcaaccgggaggccngatac

SEQ ID NO: 6072 - DNA, 510 bp, Homo sapiens; identical to SEQ ID NO: 3928
  misc_feature (1)..(510): n=a,t,g or c

SEQ ID NO: 6073 - DNA, 529 bp, Homo sapiens
  misc_feature (1)..(529): n=a,t,g or c
cttctttattaatatgggaattctcaggaagcaattagggcagtgtctgcactcctgggcttgtgttttcagctcttccatcagtggaagtctggcttctcaggaaaggtgcagccagtccgtctaattatgatgcttgctgcatagtggccagcacggatacattcagtcagaggcttgtcagagaccagttgagacagaaaacctccaacaaatgcatctccagctccattnggtatcaataatttctttctggtcttgatcccaagacagcaaaagcagtgacttcactttctgtagccattataggtgtcatctctcccttggggtgaagatcacggattcgctgcccctttgagttcatctttgggcaggggcttgtgtctttttgggctatctctttaatgtctttnggtctcaaagnccttgctctctaggcaaagtgggccagcttctgtctccatttcccaaaagctcgtgcccgaattcttgggncctcgaggggnccaaattcccnatagggaggccg

SEQ ID NO: 6074 - DNA, 410 bp, Homo sapiens
  misc_feature (1)..(410): n=a,t,g or c
taaananaccagtgtccataaagttttattggaacatagtcacactcatttccatgttgtctgtggctgccttcatgctgcagaggagagctgagtagttgagacagtgactatgcggtctgcaaagcgtaaaaaaggatctagtctttgcagagaaagtttactgctcccctgggctagtgggatactaatgtagggggtttaactgggggaggaantagagccttagcagcagagactttaggaaagcatgaanttcaagntaggaantntcagtccctaaagctgatgtggaantcttgcagggtaggagtcactctaggggctcagatgggtgacactgttctctatgcagctggggctttcagattttcataggggcccagtcaagttgctcattcccggctgtn

SEQ ID NO: 6075 - DNA, 439 bp, Homo sapiens
  misc_feature (1)..(439): n=a,t,g or c
tgatttaaaaaagatttatttacttgttgaatatttattagtagtagtagtaataaatataaccccgaagccacaaataaccttaggattctctcagctttaatggcagtagagtccagcttcttaatcttttgcacaaaatacactcaaggaggagctatccataagactaatagaagacttttgtctccctgacccagctcctctaatttcatatgggaaacacctaacagccataaagtgatgatctgggagtcctcattagagatgggctggacatgtcagaaagctgaagaaagaaatcaacctatttcgtgaaccttaccatctaaaattgttagtctgtgtcttctaaataaacagagacctttttctcttgggttgagccnttcccccttccntttggattttatctccaccacttttatggaggctcctt

SEQ ID NO: 6076 - DNA, 392 bp, Homo sapiens
  misc_feature (1)..(392): n=a,t,g or c
taagacaaaagggtagagtttattcagtttctttaaaagcaaatatctattatccagatagtgacaaagaaatcccagaaagggtgttctgctgagtttacttttattgaacaggcagttggacagacagcattgtaatcaggacattttgagggctcagacttnggtggagatgtctttataccctcagatcacagagtctaggaggaaagagatggaaaagactgaaaatcagtgagtccattcccaaaagctctgtattgttttctatangcaaaataanacaaagctccgaagganttcttttgtatatacagatgggtgaagganggtggatttcaggaactgggggggtttatntttttnccctcaatgggctttccaacaaatcc

SEQ ID NO: 6077 - DNA, 392 bp, Homo sapiens; identical to SEQ ID NO: 4101
  misc_feature (1)..(392): n=a,t,g or c

SEQ ID NO: 6078 - DNA, 459 bp, Homo sapiens
  misc_feature (1)..(459): n=a,t,g or c
ttgctgagttagaaaattgtattcgtctctttattggtctagaaaggggtggagacttggaatggtgaggcctgggccatgtgggagtggggtgtgcacaggtcagcaggtcagcagaggagtggggctgggctggggctgcaggagcgattctcccagggccaggagagccagtgagggtggtccgcactccgatgggacacagtatggccaggccaggcggacaancccctcctcagtgctgggtcatcttggccgggctcggggggtatctgaccttcaggccttcatcattcatcagaggcctcaccaggcaagagcggcggtgagagaaagtctcgaagctcttcttgccatggtaggatcccatgccgctgttccccacgcccccgaagcaagagagtgcaaggtgatgtggacgatgacatcgttggccgccaccccancactggatgtctt

SEQ ID NO: 6079 - DNA, 572 bp, Homo sapiens
  misc_feature (1)..(572): n=a,t,g or c
tagaatttatataaatttattaatttatttttagttgtaggaaacatcagaaaaaaagtaaacttgcccagcacttcatagctgtattttgggtttttatcaaattcagctccatttgacataagcaatgattatcttctcaaatacaccacccaccaatttcatagcatcattctttttccccaaagcaagaaatcatatgctgttctcagtgcactccaagccattcattcatttcacctacactctaaaggtacaaagcttcccttctttaaacacacaaggtggcacctatgaagcaggacagagatgaggactgaccattattggttaaggatcaattgcaaccatctgcagaagccaaaagataagattaaaactgccatttgcagtaggggcagcggtgggaccacctttgaatcccgcactcccaaacaggccatgtttcagagtaagaaaagtaatctagaatgccagcctgtctggcacgtcctctggaaaatggcacatggtcatcctgattcaaagacaccggnggggggcacggatacatatnccaatatcctttactg

SEQ ID NO: 6080 - DNA, 410 bp, Homo sapiens
catgctaaatttttatttcaatgttatgcaactgcataagtataaatattttgttcaatatacaacaattatgacgtccataaggaatttcttagagaaaataagactgcaaacactttattgcacagatcctaacaaacttttaagctggtaaatctacagctgggagtactaccaaggagcacatcctacaatcacacagagactgaccaaatagaacacaatgaggagaatttctaccagctgattggagaggtttacaacaacaaacatgtaatacatgaatgcaaccttaagtactctttactcatttataatgaaaaacatatttggcaaaaatgatgatacactatacaaaatatacataaaaatatcatttgtaaacaaatagctagttgtgctttaaagga

SEQ ID NO: 6081 - DNA, 414 bp, Homo sapiens
  misc_feature (1)..(414): n=a,t,g or c
ttttttggcttaaacaacaaaggtttatttcttgctcactacatatccattgtgggttggtggggtgggagtgggggattctgctcatcgcttaggaccccaggctggcagaggagggtttcaactggagagctgcttctatgtggcaacctggacccaggctctcaaagcttctgcccagaagtgaccctcggcggttctgctcatgctccactcgccggggcagccccgacctaacctcccagcaggcagcnatcacatgttacaggtgcccaggagaggagaaactgcacctttgtcaacaaagacgaccacggaggggaagactgctgatggagggtggtcaggagtaggggggcttgttcctgcctgcagtttctcccctatctcccaggactgagctcgacacaggca

SEQ ID NO: 6082 - DNA, 602 bp, Homo sapiens
  misc_feature (1)..(602): n=a,t,g or c
ggtcgagctcaggttctgcttgccgggtgcccagtgaagccgacagagcctcgagtgcttgatcactcattgtatccttctccacctttcttttcttctcttggggtggagcagcacttctgactgtccctgctgactgagcttttaaaacttctgtagattcctctttttcagttttctttccagcagctgtaggcgacccacaggtgaagtcagatgacaaggcgtctatagcatcatctggccctatgggtttagccaatagttccctatattttggaggaattgtgacttctcttttacccaattcctctatgtaggtggaactcattggatctgaaacttctggtccagtatacgttgtattttcttcttcagtttcttcaggtcctcctaaagtatctattaagtcatccaaagcagcatccatgcctgactttcccgatggtttatccggtttagattcaactggcacagctggggttaatgatttcttttcttttttcttgtcanccggcttgcagatattgcagtgataccagcaacantctctccaccagcagaaatcatgtcttgtgggttagtctttgggtcnggtgatt

SEQ ID NO: 6083 - DNA, 341 bp, Homo sapiens
ttttttgacatattacgaaatagacatataaaatttaattcctttggtttaaaatacatcttcaatgatacaattaaaaataacacacaagacaaaatcaacttcataaaaaatataaaagttatatgacccatatcccatatcttatcttagaaaaccagcaatttagttcccatacttcattagaatactttaacctaagactgtaactaccagtccatttacacgaatgacctagtctagttccctgaacctaaagatacccgtgactttgttataaaattacatattttagtatttttatatacttaaatgtgtacaaaatgttcccctgccatagt

SEQ ID NO: 6084 - DNA, 281 bp, Homo sapiens
ttttttttttttttttttaatagcttatgtataaatttattccttttgttcttttcctttgaaataattctctctgtgcaggtaggtggggcgcattttaggtctaaggaggtggaatcttgcggaagtcctccagcccctccccaaatcccagttcccctttccaagtccctccatggggtctccagatgatcctaagctcagaatccaactatgaagtgcagaatgtaagggcgcaggggaggaggactttgctcctctctctggtagaaaaatagatc

SEQ ID NO: 6085 - DNA, 431 bp, Homo sapiens
atagtcttacacttctcatacatctttggtaaaagctccattatacaatatggccaaagtgtgaaggaccaatactgtccaactataccatgatatcccgctcaattttagttttcagacaccctcataaacaaaacccactccaccttttcctgtatactgcctttgcagtctacatttctgaaattccctatttaattccttgaggatcactaaaattaatccttaaggctatataggaaccagatgctgctttacaattctgcatcaagcattaacatttggttcaaaatattatcatagtggtcgcaatccagttactggtcctaaccagctaaccaagtaatcttgttaggatctggatatcaccagcgagcacactgcttacacatgaagaaaaataagtttacattcattgtcatctgtaggtt

SEQ ID NO: 6086 - DNA, 401 bp, Homo sapiens
tcaatttcttaattagtttttatttattttttaaattttattgcatgtcctggcaaacaaaaagagattgtagattggcttctggctccccaaaagcccataacagaaagtaccagaagacaagcaactgaagcttaaaaaatgtatcacatgtataataccttttgaaaacattaataaagcatataaaacttttaacatttgcttaattttgtacaattataaaaataatagaaaaaaatatccctttaacattcaatatcccacatactgttattttaggggattaccaagaaaaaaaaaaggtaaaaggatttaatgaaaactctgctttccatttctgtttataaacgtctccaaacaaaaacttttcaattcttcagctaactgcattgagctga

SEQ ID NO: 6087 - DNA, 533 bp, Homo sapiens; identical to SEQ ID NO: 4807

SEQ ID NO: 6088 - DNA, 519 bp, Homo sapiens
ttttttacatttctcaacttttattgtgggcccttcaaccatttttgctgctgggtttcatattttcggattgtttcacggatccacaggacgtatcttgagacacgggtgtagacaccaggccggtcaggttgcccacatgggaagtctccccaggagagaatgccatacagtgttctgttacagaccagggggcccccagagtcaccctcacaggagtctttgccaccctcttttgtgccggcacacaacatgttgtcagtgatctttcctgggtagacttgacgacactcctcatctgagcgaagttggatgttggcacaattgtagagttttggggtaattcactcagaccttccctcccatctctgcccctgtttccccagccactcctatggggcctcaggcacctgtgtgggtgcatacctgggggctggtggtggtgcccagccagacacccgacagtggtgccaggggttaggcggttgttgtgggaaaggggcagggtttggatgtagc

SEQ ID NO: 6089 - DNA, 366 bp, Homo sapiens; identical to SEQ ID NO: 599

SEQ ID NO: 6090 - DNA, 374 bp, Homo sapiens
tttacacatgtcatggctttttattgagactggggaagggccgtggtagcaggtgcactcactgtccaagtttgtccagactttttgctgcatgggtgatggcatttgtgactgtgttggtcactgtctcggtgatttccttcatctttttgtcccctgactcctgggctttctttatggcttcagcaatggctttctctccagtctccttggcatgtcccaccacctccttcaccacttcctccacggcatgaacttccacctcttggttccctcatctttagaatgggaatctgttgggatgatgagacccaacaccaggtcacgggggcggcaagtccagcggagtcaaaggaatgagaaagagacagttc

SEQ ID NO: 6091 - DNA, 402 bp, Homo sapiens
tttttttcttcaatgactttaattggaaacttgaaccttctaaaccatagttcacacccggctctgtggtacagcatttagttctcagtggggttgggggacaaatgcataattgaggttaaaatagggaactacagtctctctggtctcgtagagttattcaaattatggctgctggataaggcttaaaataattatgttaatgacaccaagctatgggttccttcttcttctgatgctgaatcatcctcctatgaggagaactctttcaaaaaaaaaattggggatcaaaatacaagtctgtggctgcactaaacatccacaagtgggaaacttcttgttgcagatactgagctggacacaaaaacactcaggcctggagaaggcaccccacccccagcc

SEQ ID NO: 6092 - DNA, 460 bp, Homo sapiens
tttgaataatacaaaactgtttaatactaccaaaaatataattgtatgttgtgcggctctccctggctatcatgggaggactgcaggctgcctctgaactgtagtccaacaggagaaagggttgacagcctggggtaggggatgctgctggattaaaaaaggaggatgaggcccgtcccgtgaggtctgcgtccatgagggttagaggtgggttaggggcatgggggcaccagcaaggggagggttgtatggagtgggagagccagggggcaggtagtgggtataggtgggcagcagttccccctggagcctagggtcactctgagggagggagcacggtgagggggcttccagtttgcagtgggaagagccatagctgccaggcaggtaggctgtcgagtagctggggggtctgtacccaaagcctctgctcggttgggtggtcgcgtaccccggcccc

SEQ ID NO: 6093 - DNA, 175 bp, Homo sapiens
aaggataacatagatttatgtttatttgcattttatgtttccttatggttcatatgagtttattggaaaattagcaacatacacatcatttgggggaatggaaagtgaggcagagtaagccagaacattcactgtaacattataagcaagtagaataaattgataataccttcac

SEQ ID NO: 6094 - DNA, 416 bp, Homo sapiens; identical to SEQ ID NO: 2986

SEQ ID NO: 6095 - DNA, 348 bp, Homo sapiens; identical to SEQ ID NO: 4568

SEQ ID NO: 6096 - DNA, 419 bp, Homo sapiens; identical to SEQ ID NO: 1399
  misc_feature (1)..(419): n=a,t,g or c

SEQ ID NO: 6097 - DNA, 206 bp, Homo sapiens
  misc_feature (1)..(206): n=a,t,g or c
gcagtgagccgagattgcaccattgcactccatcctgggcaatagagagactccgtctttaaaaaaaaaaaaaaagagtaacaaggtctggaaataaatacatcaaattgctatagaaacagcaaatatagaancttgaggttgatgaaattcttccttctacctttccacattttccaaattcactatataatattataataccg

SEQ ID NO: 6098 - DNA, 413 bp, Homo sapiens; identical to SEQ ID NO: 3256

SEQ ID NO: 6099 - DNA, 494 bp, Homo sapiens
  misc_feature (1)..(494): n=a,t,g or c
tttttttttgtgatatcttaccatttattataattgcgnacattagtgtggattaagtatgattagnaacactaagnaattgaaaagaaanaaaaaggaatgcatccctcttnctcagatctgcaaaattctgtgcctttttagacatgagagaggctgttttggatctaagtcaataatggctcttgcaagatttctttcaatgtcttgcatgttggttctaaaactcccttaaaggcagactataccttgaacgggggaaancagcctatcttgggcctctttaccttgcctttcatccactggtcctgcactgagnctcagggatagcacctctcaccaacggggtgacttttatttccttcactcattcattgngtgctgtgtgttagtgtcaccacgtgccaagtctgatgttggggctacagctgaggnagagcagttggnatttagtgtggggncatgcctccagaggnatcacttcaaataatggg

SEQ ID NO: 6100 - DNA, 352 bp, Homo sapiens
  misc_feature (1)..(352): n=a,t,g or c
attatgagggtcgtgggtgcggggtctcagaggcctggccgcggctggggctggggctggagttgggtctgggctcacgctccaggctggtgttgggctcaaggctgggcttgggctcaggctcagggctgggctcaggatctgggctgccgtcctcctccgggtcttcatcccaggggaaggtcggcatcccccgcatctgcttgcggtaggcacgatcgaaggcttcgctctgggccaccgtgaagtggttcttccagtcgccacagacccctttccggagaagggccccgcgacggtggtccagcaggntnggaggcagcagcgtntagttggacatggtnttngcctt

SEQ ID NO: 6101 - DNA, 384 bp, Homo sapiens
  misc_feature (1)..(384): n=a,t,g or c
ttaacacgtaacacaaaagcttttacttggaaactggcaaatactggactagaatactgacatgctcacgctctggcgggngtcnggatgcagaagctattgcacaaagcccctctgattgccttgctcctctttggcatgtatcagcagancccaagggcaattgcccacaggtggggactgttctccatcaaggtatggggacccctacttccttgttttgttaaaaagtgcaggtaggcgaagaagcccaggcagttgacccagtctttgaaacagctgactccccagcacccagtgtccactgggcagatgagaggtttgcacctataccagcccttgtttccttgggtaggggctcaagttgtcagtgtccagggtacc

SEQ ID NO: 6102 - DNA, 349 bp, Homo sapiens; identical to SEQ ID NO: 3708
  misc_feature (1)..(349): n=a,t,g or c

SEQ ID NO: 6103 - DNA, 485 bp, Homo sapiens
  misc_feature (1)..(485): n=a,t,g or c
gcgggctaacgtttatttgccagccaaggccccgggccgcctggntntctgctcagaagatcctcacggagtccagctgcacgtccccgcccacctccaccaggcgcacnggcangcggcaggcggttggcggaagtggtggtactgggcgtccccaaccacggccttgaagccgtccgtctgacgcgatgatgagcacctcgaagggctgcccgcgctggaaaggaacgcccggcccgcgctcctcgcggccccaaggaagccttgctcctttgctgttgaagaccacctccgacgtgtccagccgggggttgaaatgcagcgcggcatcggagcccttgctcctccccgcacagcaggttttacattggaaccttgcttgggcatttggggaaggaaancaaagcccgncgaatttcttaagcaaccgttggccaaggggcgggatgctttncggggcaangttgaaggaactttnttggggn

SEQ ID NO: 6104 - DNA, 2051 bp, Homo sapiens
cgccactttgctggagcattcactaggcgaggcgctccatcggactcactagccgcactcatgaatcggcaccatctgcaggatcactttctggaaatagacaagaagaactgctgtgtgttccgagatgacttcattgccaaggtgttgccgccggtgttggggctggagtttatctttgggcttctgggcaatggccttgccctgtggattttctgtttccacctcaagtcctggaaatccagccggattttcctgttcaacctggcagtagctgactttctactgatcatctgcctgccgttcgtgatggactactatgtgcggcgttcagactggaactttggggacatcccttgccggctggtgctcttcatgtttgccatgaaccgccagggcagcatcatcttcctcacggtggtggcggtagacaggtatttccgggtggtccatccccaccacgccctgaacaagatctccaattggacagcagccatcatctcttgccttctgtggggcatcactgttggcctaacagtccacctcctgaagaagaagttgctgatccagaatggccctgcaaatgtgtgcatcagcttcagcatctgccataccttccggtggcacgaagctatgttcctcctggagttcctcctgcccctgggcatcatcctgttctgctcagccagaattatctggagcctgcggcagagacaaatggaccggcatgccaagatcaagagagccatcaccttcatcatggtggtggccatcgtctttgtcatctgcttccttcccagcgtggttgtgcggatccgcatcttctggctcctgcacacttcgggcacgcagaattgtgaagtgtaccgctcggtggacctggcgttctttatcactctcagcttcacctacatgaacagcatgctggaccccgtggtgtactacttctccagcccatcctttcccaacttcttctccactttgatcaaccgctgcctccagaggaagatgacaggtgagccagataataaccgcagcacgagcgtcgagctcacaggggaccccaacaaaaccagaggcgctccagaggcgttaatggccaactccggtgagccatggagcccctcttatctgggcccaacctcaaataaccattccaagaagggacattgtcaccaagaaccagcatctctggagaaacagttgggctgttgcatcgagtaatgtcactggactcggcctaaggtttcctggaacttccagattcagagaatctgatttagggaaactgtggcagatgagtgggagactggttgcaaggtgtgaccacaggaatcctggaggaacagagagtaaagcttctaggcatctgaaacttgcttcatctctgacgctcgcaggactgaagatgggcaaattgtaggcgtttctgctgagcagagttggagccagagatctacttgtgacttgttggccttcttcccacatctgcctcagactggggggggctcagctcctcgggtgatatctagcctgcttgtgagctctagcagggataaggagagctgagattggagggaattgtgttgctcctggaggaagcccaggcatcattaaacaagccagtaggtcacctggcttccgtggaccaattcatctttcagacaagctttagagaaatggactcagggaagagactcacatgctttggttagtatctgtgtttccggtgggtgtaataggggattagccccagaagggactgagctaaacagtgttattatgggaaaggaaatggcattgctgctttcaaccagcgactaatgcaatccattcctctcttgtttatagtaatctaagggttgagcagttaaaacggcttcaggatagaaagctgtttcccacctgtttcgttttaccattaaaagggaaacgtgcctctgccccacgggtagagggggtgcacgttcctcctggttccttcgcttgtgtttctgtacttaccaaaaatctaccacttcaataaattttgataggagacaaaaaaaaaa

SEQ ID NO: 6105 - DNA, 664 bp, Homo sapiens
tcttttccacagatatcagttgtaagcacagatgatgatctagcttgacttctgtgacaaatgttgacctttgaggtctaaacaaataatacccccgtcggaatggaaccgagccagcagctgaagtctctttttcttcctctcggctggaagaacatcaagatacctttgcgtggatcaagcttgtgtacttgaccgtttttatattacttttgtaaatattcttgtccacattctacttcagctttggatgtggttaccgagtatctgtaacccttgaatttctagacagtattgccacctctggccaaatatgcactttccctagaaagccatattccagcagtgaaacttgtgctatagtgtataccacctgtacatacattgtataggccatctgtaaatatcccagagaacaatcactattcttaagcactttgaaaatatttctatgtaaattattgtaaactttttcaatggttgggacaatggcaataggacaaaacgggttactaagatgaaattgccaaaaaaatttataaactaattttgtacgtatgaatgatatctttgacctcaatggaggtttgcaaagactgagtgttcaaactactgtacattttttttcaagtgctaaaaaattaaaccaagcagcttaaccatg

SEQ ID NO: 6106 - DNA, 2648 bp, Homo sapiens
gtgacagaagctgtgggaggagctggaggcttcaccgtggtaatcacagcgccgctgctgccccgccttgcaggtctcaggactgtcatcgcctctgggtgtgagggtactttggccaccgtccccggaaataaccgcgcctgcctctcaagataccccatcctctccacgccgctgccgctgccgccatgcaaggggaggacgccagatacctcaaaaggaaagttaaaggagggaatatagatgtacatccatcagaaaaagcactcattgttcactatgaagtggaagctaccattcttggagaaatgggggaccccatgttgggagaacgaaaagaatgtcaaaaaatcattcgacttaagagtctcaatgccaacacagatataacttccctggcaaggaaggtggttgaagaatgtaaactcattcatccttcaaaactaaatgaggtagaactgctgttgtactatctacagaaccgccgtgattcattgtcaggaaaagagaaaaaagaaaaatcaagcaagcctaaagatccacctccttttgaaggaatggagattgatgaagttgctaacattaatgacatggatgaatatattgagttattatatgaagatattcctgacaaagttcggggttctgctttgatcctgcagcttgctcgaaatcctgataacttggaagaactactattgaatgaaactgcccttggtgcattagcaagggtcctgagagaagactggaagcaaagtgtcgagttagctacaaacataatttacatctttttttgtttctccagcttttctcaatttcatggacttattactcactataaaattggagctctgtgtatgaatattattgatcatgagttaaaaagacatgagctttggcaagaagaactctcaaagaagaagaaagctgttgatgaagaccctgaaaaccaaaccttgagaaaggattatgaaaaaacctttaaaaagtaccaggggcttgtggtaaaacaggaacagctattacgagttgctctttatttgcttctgaatcttgctgaggatactcgtaccgaactgaaaatgaggaacaagaacatagttcacatgttggtgaaagcccttgatcgggacaattttgagctgctaattttagttgtgtcattcttgaagaaactcagcatttttatggagaataaaaatgatatggtggaaatggatattgttgaaaaactggtgaaaatgataccttgtgagcatgaagacctgctgaatatcaccctccgacttttactaaacctatcctttgacacaggactgaggaataagatggtacaagttggactgcttcccaagctcactgcactcctaggcaatgacaactacaaacaaatagcaatgtgtgttctttaccacataagcatggatgaccgctttaaatcaatgtttgcatacactgactgtataccacagttaatgaagatgctgtttgaatgttcagatgaacgaattgacttggaactcatttctttctgcattaatcttgctgctaacaaaagaaatgtacagcttatctgtgaaggaaatgggctgaagatgctcatgaagagggctctgaagtttaaggatccattgctgatgaaaatgattagaaacatttctcagcatgatggaccaactaaaaatctgtttattgattatgttggggaccttgcagcccagatctctaatgatgaagaagaggagttcgtgattgaatgtttgggaactcttgcaaacttgaccattccagacttagactgggaattggttcttaaagaatataagttggttccatacctcaaggataaactaaaaccaggtgctgcagaagatgatcttgttttagaagtggttataatgattggaactgtatccatggatgactcttgtgctgcattgctagccaaatctggcataatccctgcactcattgaattgctaaatgctcaacaagaagatgatgaatttgtgtgtcagataatttatgtcttctaccagatggttttccaccaagccacaagagacgtcataatcaaggaaacacaggctccagcatatctcatagacctaatgcatgataagaataatgaaatccgaaaggtctgtgataatacattagatattatagcggaatatgatgaagaatgggctaagaaaattcagagtgaaaagtttcgctggcataactctcagtggctggagatggtagagagtcgtcagatggatgagagtgagcagtacttgtatggtgatgatcgaattgagccatacattcatgaaggagatattctcgaaagacctgaccttttctacaactcagatggattaattgcctctgaaggagccataagtcccgatttcttcaatgattaccaccttcaaaatggagatgttgttgggcagcattcatttcctggcagccttggaatggatggctttggccaaccagttggcattcttggacgccctgccacagcatatggattccgccctgatgaaccttactactatggctatggatcttgataaagtatctgtttccatgtgtaatctcagcttagaagaaatctgtgtgggttgggttaattttggatctttgcctaataa

SEQ ID NO: 6107 - DNA, 1537 bp, Homo sapiens; identical to SEQ ID NO: 3078

SEQ ID NO: 6108 - DNA, 26668 bp, Homo sapiens
  misc_feature (1)..(26668): n=a,t,g or c
gaattcagatgttagccttgtgccctgagagtggatttgctagaggagaggctgataatccctctgcagggagttccctctggggccagagatggacccagcccagccagcaggcaccttaggcctctggccaaagccccccttccctccctcccttcctctctgctttctttgcactcaggacacttagacctgccccactccgctggcttcccctcactccatctctgtgcccagagaaacaggggtactccaggggaatcctgtcctctgactgttcccagtagaaggcgggagcagaattttttcttttctctctgccccttctgggttccccttcctctctgtgcccctcatcctttggattactcatcaaatgagcagcaacaacacccctagaccagctggtcctgtcctgggtcatctcgttgtccccagtttctagctggtataaggttaaagataccctttccagccccaggcaaagccttaggcatttctgggatggctcctgactctgatgggcatcctcactcctcagacatttccaatctcccccacttcactgcagagaggcctgttctccagcctcagtcctgcatgctgcagctttgcttccccttccccactggaagaaggaaacagtcgctctcctttcccgttcacatgtctgatatttgctatgatattgaccttcacacacatcttagaggttctgtattttcctctcttttgacttctccctatcactactctactcaggcatagattcagtctagagctcttcaacagcaatgaaacggtaaacgaggggtaaacaaaacccagagatgtcatcaggtgcctgctaggagtcccacccgttcccctctagccctggcctgcccctccctaccagagtcttgattctccttcaaaactttggagaggttacatctggcagggtttggggacaccctcttgcctccatctccaaacttcccgctgcctcccgagccacctttgactcctcctgggccccccttccaggtgcctcaagtgcagaggtcagccttcggttcaaattctatttctgggcttcagtgtccctgcaacctctataatagaaggaacagagtggtctatgtttctttctttctctgggagattggatgtagactcgggagacctgagttctggctctgtcttatcaattcaaattgtttaatctctctgagcctcagtttacccacttggaaaagaagagttaggccacatggtctctgtcatcctgggattctgagtcaactgctccccttcagccagatcctagggggcatatccccccaacctgggacccaggcccccttcccttgcagcctctctcagttgtgagtgccacaggccagagggggttgagaggagccaagggggggcatgccgtgggacaaacgggctgtctagggccagtggctaaaggggcgggaggggaggagtcctcagggatcctgtttcaacaaacgtttctttcggaggaggggaaggcgggggagagggggagaaggacctatttaaagctaccctgttgctttggctttctctgtctgccagggtctccgactgtcccagacgggctggtgtgggcttgggatcctcctggtgacctctcccgctaaggtccctcagccactctgccccaagatgggccgtggggtgagtatccctaaagagcaggggtcgcagtctagagggtgagggaggctgctgaggaaggatgaagtgggaatgggatgtggaaggagcgggagagaggagctgagtgggatacttggaacttgaaactaacagtctccaaactaccaatgtgtgtacagatcccacggcggtcacataccctagtgctctcctctcctctgcccgccccagccccctgcccacagttagacccacagcccaccacacatgccccctccatctctccctccaccccactcccacatctctagtccttccctgcagcagtccctcctctcactgcatctcccggcctcccagctgaaaggatgtttggcactgtgagtcctcctgtctttgccacctcctgaaaatatccattcctctgggagtcctagcctgagaggctgggggtccattttgaggttagagaggggcagtagagcatccggctcccagagtcaccaagtagttccggacaccagctccaggggccctgagtgccaaggacagctgggcggggtgtggggaggaagaatgatgccccagcccccaccccagcacccctccggatgtcccgagcagcattgtccgtgggttccaagccatgggctttgaggactttcccagaggctggtgacaggtgacccccccccagtccacccgtccatggcattctgcagcaatggctacaccaagaggaagattaacaacaatggggcgggcagggagagggctttgaattcttggaaatgaaattcccatatggagaagagtggcccaatccttttacatgctgtgcctggctgctttccttttgtggaatactggcaaaagaggacacagagggaaagggcatgctgcggaacaggagagtatgaggaagactgtgcctagggggagccgtgggtgtttctgggcccaggaggagtcaggcaaggacatgttattgcacctagttgagcagctgggaaatcctgagcctggacaccagggttcctgagctagggttggagccataaatagaattggagtgcatgcatgtatctgtgtgtctgtgtctgtgtgtgtgtgagtgtgtgtccttgaccacgtgttctccataggcggggagtcctgcagttactcatggatgagtacctgtgtttgtgtctcagcaggcaaatttgtaaatgtacaagccttcaagcctgcacaagcataaatgtcactgtgtgggggtgcttgagagtctgtgagcctgcccttaggagctgtgaggtatgggcttcacggaggaagaggtcatagctgcaggaagatatactgtcttgggaccttcagctgcatcttgacatctctggctccccatggaaagggcatccctagctgagatgcaggacctctgagaagaggcaggggttaaaggatcagataagccctccatttccccatccaagtgaagagagaaggaggggaggtagccccctaccctgctccatcttagagcaaggtagacccagctcaggaggtcttgcttgggaagtgatgagaccttgacttttccagtctgtctttttcccctagcacccccaaactccccttaatcaccatcctaagttgctgtgggtgatgcaatagcaagatgaggagcagatctgggctgtttaaactaagaggctgggtgaggtgggggtatttagggcctggagcttagagttcaacctaccaacgacccctgaagagggaaggcatctgacacccacaacctgttctagggatgatttttcctccaatcccttctcccctgcatctccactgcagaggcaggcttcactgtccccccattacccagtggctgtgaagggcagcgtgggagttgggggaagggacgacactggtgggagggagcccagcctgctccagctaccacggagaggctgagatggggggagcgttggcggattcccagctgcccccactctgtcccagcctctggctttctcaaaaaggactctctgttctccttcagcattcaagacccagagagggggacttgtggttgggggagggaggagtggagggaggttgggggggtccttgcttcctctctttctttcttgcctgggcagccgctggccccaaatctctgcaggctcctggctgcagagcctgagatctttgccaggacaggaggagggggaaggggcagtgtgtctcaagctctaagcctgctggagagcagggcgggagcttgggaaaaggaggcactgcgtggagctgcttagctcagccacaatccagcatgccaaagtgcatggaccagcaagtttttaaaaagcatgcattttattccaatttttatgaaatttatttcacatctgaatatacagaaattcctctgcaccctgctcttctgcccacagacccagccctgctcctctgtgtatgcctgggcccccttctgtccctgaagttcctgagggtcacactgaagctcagccagcctgatctcttgcctctgttcccttgattgcatttcttccttttctcagctctgtcccaccacagacagttagtgaatgtaaagcatttcaatccactcaattaaatgaatcctcttaggtcacctgagaaaggcagaggcagaaccactcacaagcctttccccaccccttccattgggnngctcggtctccccaagaagatctgcctttaggaggccaaaattataccagattcatagatgcttcaggtggagacaaacccacgattttactggtcaccttttctgagaagagcacttctgagcaacacagcctccaaaagctcaatatctttttaaatcattggtatcttgggaacaacagtgttgacttctccttgcatcccccacccctacccttgcttctgattgtactggtcagacttctacctctcaagatgctgaattggcgacctcttatgaacaaggcagctgccatacttctgggattgctcctgactctgataagtaaaaaaggcattaccctggagcacaaaagtcttagggcagtgaagctattccatatgataccacaatggcggatacacgtcagtatacatttgcccaaacccatagaatgtacaccaagagtgaactcaaacttaaactatgggctttggacgataaagatgtatcaatgcaggttcatgattgcagcaaatgtaacactctgatgcagggtgttgatagtgggtgaggctgtgcatgtgtgggggcaggagatatatggagaactttctctacttcccactcaattttgctgtgaaccagaaaattgctccaaaaaaagtatattttttaaaatgcaaacaaaacccccaaaactgcattatcctgcaaaaaaaaaaaaaaaaaaaagcaaacaccttggctgtggaccctacccaggtatccactctttatgggaaacaaaagttaacatcatagtgtgggaaaactaattcctgaaagcctagtgcagactttgcagaatccagtggagaaataggcaccaggtggaaactgagcagcccctctatgacaaggactctatttcctgagggaagtgggaggagagaagactggggcagaagaggaagtaagaaggtacctttttgggaacttttcatggctacccaggccttcctcagcctctatcctattctatcaccccaagagggcctcctcttagaaggaaagatttcccaccctgtccccaagaagttccctgtgagaccctggaaggctggtagtggtgagcccacaggccctggagtggaagggaaatcaggagcctcataagactacaattaaaatgtccatctgctcaggcgcagtggctcacacctataatcccagcattctgggaggccaaggtgggaggatcacttgagcccaggcaatatagtgagaccttatatctaaaaaaaaaaaaaaaaagaaagaaagaaagaaaattgttttaaattagctgagcgtggtggtgcatgcttgtggccccagctacttgagaggctgaggtgggagtattgcttgagccctagaagcggagggtgcagtgagctgaaattgcacactgcattccatcctgggtgacagagtgagaccctgtctcaagaaaaaaaaaaaggccatctgattcaccagatgacccaggaatgtctagacttaaaaactatataaaatgtagttttagatttactctcagatacaatttcttatgttttgggacaaatggggctcagttcccatgttacccaattgtgctttgggggtccagtcctgtgagttgcctcccgtctagtaacgggcaggcctgcccagcaggatggagagggctcccagcacaccccatgtctccacttcctggacatgccctgactctccagctactgcctcctctcagtccatcaggcctgctctttccatccctaccattccaccaccagacctggctctcctctggacacgttcctgcctaatcccctggctccccaaagactcttactcccccaagttcctgagtatttctacccctctctaagtaaaattgccatggtgttgggctaagacattcctacagagtgattctactccctcaacaaccccccacaaaaccctgtccactcccttccagaattttcccaaatagtgtaggatacaggttttcaaaatttttgttttgttttgtatttagcagcagggtcctttcaacaaacaaaatcttagcagaagcccaagcattaaaccactcaagtggtgcttttcagtcctgagcccctcacccttctctgaaactcacatgggagcccctggttctgccaatagtctacaaactgagggcctagggtccctcaccctccatcccccctatctcccccaaggcagccgctgcttttgaacacacacccccactgcctgggctccctggctgagtggtgggaatggaggccccagcccctctcttccctgactctccggctctccctccctcaggctggccgtgagtactcacctgccgccaccacggcagagaatgggggcggcaagaagaaacagaaggagaaggaactggatgagctgaagaaggaggtggcaatggtgagggaactgctgggccatggaggaggggccccatgctgggagagctgtccctgcagcccattgcactcagagaaactccgtgtcccccatgctgctcaactcacccctgtgccctgcagtaccctcatatgcatcttagatacctcctccccaaagtaactcaccctcccttccccaggatgaccacaagctgtccttggatgagctgggccgcaaataccaagtggacctgtccaaggtgagtggaggggcttctagggaaggaacaaaagaggcaagaaaaccatgcagcatcaaggtggcaggagccttaaaactgtaatccagccttctttacagatgaggaaactgaggcccagaaacaaggactggcccaaggacatgcagctagttggtggcacagccagaactagaatttggatcccctgcatcctagcccaaagctctctccctgtataccctagaagccaggactccctatgacccaggccccagagggcctccaggcagggcccttccctataccccaagcaacttcagttgcacacagccttccacagagctgacagctgatgcacatgggctgacagcccattcctgtggttacagtgatttgctgggcccctgctacatatgtgacattgtgatagatgcgttacatacatttctctaatctttacaacaaccctttgagataggtattgcagacctgtttattaaacaaaggagactcagagagggagagtaacttcccaaggtcacatgaacagtaactggtacagtcaattgctaagcccttcaattaaaaatttgtttaaaaatcattaatcaaaaaatgctgggtgtggtggctcatgcctataattttaccactttgggaggccaaggcaggcagatcacttaaggtcagcggtttgagagcagcctgggcaacatggcaaaaccccatctccactaaaaatacaaaaattagcttggcacagtgatgggcacctgtaatcccacctactcgagaggctgaagcaggagaatggcttgaacccaggaggcggaggtttcagtgagccgagatcataccactgtactccagactgggcgatagagtgagactccatcttgaaacaagcaaacaaacagacaaatatttagtgggtgtatatctcctttatgggccttccctgactgctctttctaaaattctatgcccctattcctttaccttactttattttccttagtaacacttttctatctggcactaatatgtatttgtttattgtgtgtcacctctccagatcataagctcctcaagggcagagactttgttggtcttgtccatctctgcatccgcagagtgacaattgtgcctggcactggatatacatttattaaatgaatgaatgaatgaaaaaaaaaaaaaaagaaacggtccctgctttaaaggagctcaaagtctagtagcagaaaaaatgcaatcctaggattccaatgcaatatggtgagtgcagctctagaatcaagtatagaacaccatggggaaccagaaagaagcatctgaaccagcctggggctgagggaatagggccaggcaaggctttctgtggaaagtgacaggtgattgccaaagttgtgtgacactgatggtcaataatgtaggacttgagcagggtgtggaggtgcccacctgtagtctcagctacttgggaggctgaggtggaaggattgctttagcccagggttcaaggatgcagtgagctataattgcaccactgcgctccagcctgggcaacatagcaagaatccatctcttaaaaaaaaatctaggactctcctagaatccttgataaaataatctgaaggaagagagatggggaaaaaacagttgaggtgtctttccagggagcttatccagactgcctccaggggagatgttatggccctaaccataggtgttgtctcaatccaatataattaggggtcaagcccagtcaaacccttctcagccctcaagccctccaagttgcatcacaaatgccacctcctccatgtggtctctcctgatggtcccccaccccttccaaccaggtgggactttccttctgggcattcttcccatgcccgggagctgaagggatgggcatggtgactggctgggttggctccggatgcgtgcccctacgcctctccttgctccctcagggcctcaccaaccagcgggctcaggacgttctggctcgagatgggcccaacgccctcacaccacctcccacaacccctgagtgggtcaagttctgccgtcagcttttcggggggttctccatcctgctgtggattggggctatcctctgcttcctggcctacggcatccaggctgccatggaggatgaaccatccaacgacaatgtgagcccacacgcctgacccgggaacagcccgtgactgtcctccaaccctgaacccccaacacagtggggggtgggcagggaacaaggccctcacataacagtcctacagatgcccctgcatcttaggctggaaaggggagaggcttctatatatatctgtaaagtactcctccgccaacagtgcatacacattcacatactcattaattaatgaaacaatctctccctgttcctccccgcttaagtgagcctgtctgtgtgcctgggtcttcatcccctagcaaagtcctaaccctgggaacttcctaagactttccctcccatttctagtcttaacaggcttgaggttggcagatcaagggggaggttagtgagaagggctttcccctaccatcatcactctcagtcacagacaaaggtctgggctgtcatcttggatggcactgcctgctcatcccaagtggcagctgcccctttagggttggggggaaggtcaggtccctgaaactctttctccttaccagctatatctgggtgtggtgctggcagctgtggtcattgtcactggctgcttctcctactaccaggaggccaagagctccaagatcatggattccttcaagaacatggtacctcaggtaagatggcagggctgggctctgggctaggctgtaaggttttggcaagagtccagctcatcttctgtcagctcccaggcactaagatagagatggacagaaaagatcctccagctttccatgccagcacctaattgtttatggggcttctccttctgcttgacggtgtgggagaccagcaggagaagaaggcaggggcagagacaagcatttcatgagctgcctgtggctccccacagcaagcccttgtgatccgggagggagagaagatgcagatcaacgcagaggaagtggtggtgggagacctggtggaggtgaagggtggagaccgcgtccctgctgacctccggatcatctcttctcatggctgtaaggtgaggaggtcataccagagcaagcagttgagtctaaggagaaggctgtgtgcagagctgagaggggcccagtgaggtttaaaggtggagagacccaggtccaaatgtcaacaccatgcctacgcccctgctaaaccttctctcagtgtggggtgcttgtgcagtgcctccttgcatctgtgtgttatgaatgctctatgccccaggtatttctttgttgtccactttttagcaatcgtgtattgaataccaattatgtgtcagctgctttatatatgttcgatgtgctatctgatgtaattctgaaagagtggtgtaatcatgcagggctgctgcatgtggccacacacgttgcatcctgaatgaccccaggaggtgcattttcataactacagtgttagtgtctccccctgtggttgtgcaaggcagagattctgtttacattcaccattttacagttgagtacatggaggctctcttggttaagcaagtaacccgaggtcacataagaagtcaggaggagtcagaattccaaaccagggcaggggcaatagatgagtaatgccataaatatgtgatgagggcaagtgtgactttgttcctcgtgtcatgaagattgagtgtggttggaggtggttcaggagacagctgtgtgcatacaagtggctctgccagtctgatgactatgcactccttcctcctcaggtggataactcatccttaacaggagagtcggagccccagacccgctcccccgagttcacccatgagaaccccctggagacccgcaatatctgtttcttctccaccaactgtgttgaaggtgagaagccaggctgccccctgtaggaaagagtctgaatcctgaatccatagtcaggatgaagggctctggtagtacttacctggcaaaagctctgccattggtggggcaattgaggggtcagggggccctgaatattatggaaacaccctccacagagcagggtattgactgagggcagcctgactccatgggaaatgtatctcccttccccagggagatctctgttctgtccaccccaagacttgagtggatttcaaagctttcaggtattgggttaagaaccccttacgcatgcgcacacacagatgcacatacgctcagaaccaacctggattcttaggagtctttggatttgattgatgcttctattccttgtggttctgggcctcgctgcccccttcgataacctttgctttggccagggccccagggtctgggagggccaagaaggcattctggccaggtgaacacttggggcctacttcaggctgcttctaacctttgttacatcaaaagacatgtttcaccatgcacagactacccagtttgccccatccctgttctgggttctagagataaacaaaggtcaataagaactcccagagctgccattacttaatggcaggggtccaagcacaactgaaacctgtgccctctgtggtaaagccagtgagcagagtcagggctgcatcagagaaggagtaggagggaagagacagaaagaggcctcactagaccagtggcctctgaaaatagggcaaaggaggcctcatatcccaatccacacttcccctgtccattactcatttctcctcagtgtattatgtttctctgtggtttttttcccttcttcgacaagttggaattcaaataaggattcaaacccaaatttggctggctccaatgtgcatgcttttttcaatacaccacccttccttcccagaagacccctgtaatgtcacacaagggttagcaattgcctggcttcctctatagagattcatgcctaatgttgagaaagaaaatcttaagactggatggaaaatccataatgagtgctttactttgtgttcataatatacttttggatggtatcaagtatgggaatgattttaccaaaatgccacaggcaatttttatttattgaatcttgtctatttgaactttgagattatttgcaagcttctccccaggctcgagtacaagagaaaataatttgctgttgtattgattcaaggattggcgatctatccagggaaaggaaggccaagtggggacaacctactgaatgtggcctccagatctgcggctttggctcacctatcctgtgatgattttccttgctcaggaaataggatgggactgcagtccctgggagccacaaggcacccaacctgatgccccaccatgttgcaggcactgccaggggcattgtgattgccacaggagaccggacggtgatgggccgcatagctactctcgcctcaggcctggaggttgggcggacacccatagcaatggagattgaacacttcatccagctgatcacaggggtcgctgtattcctgggggtctccttcttcgtgctctccctcatcctgggctacagctggctggaggcagtcatcttcctcatcggcatcatagtggccaacgtgcctgaggggcttctggccactgtcactgtgagtgggtcaggctgaggtgccaccaggggagggtctcactactctttcctcagagtgatagaggcacagttgcttgtagcttctcactactttttccccctagagtcacttattggatgcgatactcagagatcacttaatacatggcttagggtatgagttgagaaatctcaggtggggctattcttaggcactcagtttctcttttggagcttgtcacggctgccttttctcacgatctgccagcagtctgggtctcattccgtccaagtctcctgtagaggctgtctcaaaggtcaccagtcactaactagcaaatccagggaccttttctcagctctcctccctaactctgctgctgaaacagatactgctgtccaccctcctaccattctctcttttgtcgattgctgtgatgtgtcactatcctggttcgcctctcctctgtcccttcctgctccccctacactgattctcaggcctcagctgtctgttcttcctacaccctgagcaagagccaatctcctcccagtttgcagtgtcccttctgtgttgatgactcagacatccctatgctcagctctgctctggccctctctggagctctagtcaaacgtcttaaaccccctaatgggcatttcatcttaacagatactcatgatctcaacacatctaaaattgaacattcattatttacagctaagtcccacccattcaagttagtggagtagaatcaggggaggaggaatggagccacggtctagggtaaggttatggccatctccggcttcagccttaaccttttttattctcctctttctctaccaggtgtgcctgaccctgacagccaagcgcatggcacggaagaactgcctggtgaagaacctggaggcggtggagacgctgggctccacgtccaccatctgctcggacaagacgggcaccctcacccagaaccgcatgaccgtcgcccacatgtggttcgacaaccaaatccatgaggctgacaccaccgaagatcagtctggtgattgggtgctccagagggggtggataggattagaggaggctgagggcagtggcgtggtggggtgagtggttgagataaaggctctaaagggagccacgctcctggttccccctcatttcctcccaggggccacttttgacaaacgatcccctacgtggacggccctgtctcgaattgctggtctctgcaaccgcgccgtcttcaaggcaggacaggagaacatctccgtgtctaaggtagggggtcaggacacacaccaggtatgttttgggggtgtctccaaagcctcttgctggccccagctttccttctcacatgatgtggctgccttgggggtttcagtgccgccttcacctgatcctccactcccttccctcccatgctgacactgaattcttgtctcttctggcagcgggacacagctggtgatgcctctgagtcagctctgctcaagtgcattgagctctcctgtggctcagtgaggaaaatgagagacagaaaccccaaggtggcagagattcctttcaactctaccaacaagtaccaggtctgcttgggttgccaggacagaggaagagagagggatataaatgggtgagggtggacaaagccaaggggaatcatcactagcaggagtgggggtgtctgagggtcatgttccctccccctgctaagtcccccaggacagctcatatgactgcatgtctgattgcaactagccccagctcccaaaccttactccatcccttactacaatctgtcactctctcaactcttcttcccatagctccgcatcctctggcctagccttccaactcttctaccccagtcagtgaaaccataattctgtaattcctttatggtgccccttagcctttaggcacctgttaaatgccaagaatgcaatctcagcattccttattatccatagaggtaaagccccctgaggccaggtggtggtggggatgctgaggagggagccgttcagcccctagcacagtgcctgtcttaacctgacctcaataaatatttgttgaatgaaagactgtcctacggaggtggctctcaggttacaagtgttggaactgtgaggtctaaacacccccctgcacaaggagattctctttgttgacaatctttgatgggttggggctacttttctaaggtggtttccttaccagctgctgctctatgccgcgctaccaagacaagtatggccctctctgtaactacctgttgtctctccagctgtctatccacgagcgagaagacagcccccagagccacgtgctggtgatgaagggggccccagagcgcattctggaccggtgctccaccatcctggtgcagggcaaggagatcccgctcgacaaggagatgcaagatgcctttcaaaatgcctacatggagctggggggacttggggagcgtgtgctgggtgagaggccagaaacaggaggctcagaaggggattcccaagcctctgcggcatccctggggtgggggactgtgggggcgtccaggaagccactctgcggatctcactgatcccttctgcccccctttaggattctgtcaactgaatctgccatctggaaagtttcctcggggcttcaaattcgacacggatgagctgaactttcccacggagaagctttgctttgtggggctcatgtctatgattgaccctccccgggctgctgtgccagatgctgtgggcaagtgccgaagcgcaggcatcaaggtactggcctcccatcctcccctccattctagcctcccccatgccagagttcaaggagctgcagtggctgctgccctggaaaggcccaggccacggtggcctccttcccactgactcagagaagaagctgtccatctgcaaggaaaggcccacccctgccttggggcactcacccttatcccttttgctcagagaggccagtgtcccatgcccctcctctccctccctggcacagctctttgtcccatctgcatgtgtacccttccattctgatttgaagcataatctggcactcctatcttgaagacctagttgtcctacccttcccaactactgcccaccctctctgtcaacttaggatgggattagcaggctcttgtatgctcccagtggctcagcccataaccccacagaatgcctcccactcaaggttctcttgttcaactacaattgcttctcactgaccactccctcctctgtgctatgtttgttcttcattcaacaaatatttactgtttactatgtttcagacactgtgcaaggtgcaaactctagcaccttgcacagtgcctgatacatagtaaacaatttgtgtcacatgacacatctagatgggacaatgagctgtgccagggaggacacatataaatcaggcactattctaagcactaaacctctatgatttcatttaatctacgcaacaaccctgtgaataagcaccagtatttttccttttttacaaagagggaaactgaggcacaaagtaacatgccaaggccacacagctagtgtaagtcatagagcaggtacttgaaccaaggcagtctgctatttcttaactatcataccaggagacttgtttctgtgggtgtatgtggtttctgaaccccataaccactctgtctccgaggcaggcatcattatccctgttaaaagtaaaacaaggctgggcacagtggctcatgctgtaatcccagcactttgggggggtccaaggctggtggatcacctgagataaggagtccaagaccagcctggccaacatggtgaaaccccgtctctactgaaaaaaaaatacaaaaattagccacgtgtagtggcaggtgcctgtaatcccagctccttgggaggctgaggcaggagaatcacttgaacccgggaggcagaggttgcagtgagccgagattaggccactgcactccagcctaggcgacaagagcaagactccatctcaaaaaaaaaaaaaaagtaaaacaaatggaaactgcaagtgggtaagtcttttccccaaaataaaaccaccagtaagtgatggagtgggactatgaagcatgatctgcttgaccggaaagcctgagctcctgctgcttggccaggtgcctctctctgtgatcagaaccatcacggaggcctgggcagaggacctctatgggaagtcagctcagggaagcattaattctgcctcagagaactggacgatgtttgacaaaaggaatgatatttgagctgggctttggaggtcaaagagtattctgcaaagcagtgagggagaggaaggcatgtcaagatcagggaacagtgtgtaccctggcgtggctagactgtacggagcgtgtgtaggggttggcaggggagaggtggcaaggagtactgggggttgagactggaacactgggtcagagccagttggaaggacttggcttaaatgccagacttgggctttatcctgcaggccacagagagccatcagtgtcacgggggaggttgagcttttaggagactacctggtttgaggagggactggatttggggaagaactggagtcagggagagacaggttaagaggccattgccatagttcaggcaaagaatgatgacctgaactagggcagaaacaaagggaatggagaggaatagccatgtctgagaaatgttttgagaacttggtgaccaaactggatatggaaggtgaggaagatacaggagagaaggggacaggatgaatagagaggacaacatctaaggtagggagcagtagcaggcttggtggggtggcaggagtagagaaaaggagttcaatgttgaccttaagcttaaagagtctataagataccccaggaaagacagatgttccagtgaacattggagtatggtttagagctcatgaaagatggtcaggactggagatttgaatctcattagcacaagggtgcaaactaaaggcttatagtatgttgtattatattgcccagaaagagcagacaggtcaagtgaagggaggagaatgaaatcctgtgccaaaccaacatttaggcacaagaggaaccagtgaggaggggagagggtggtaggaaccaatgccatttaatcttcatgaccacctagaaaggcaggaatcatctctgcattgtgctgagacctcagtgcttcacttgcctaaggtgctgtagctggagaaggtcggtgtttaaacttgagcccctcattcaactccaaagccactgcttcttccatcctactaggctgccaccctgagaggctgggaaagagcatgcagaggagtggagggaaaacaggaatggaggagtatgtggaagccaggggagggcagggtttcaaggagaagaggtcaacggtgccaaatgcctcagaggggtcaagtaggatgaggacggcaaagacacttttcatttttcaattgagaggcccctgtggcctttgggtggcagtttcagtgaagtggtgggagtggaagataaggcagtggggaccatggaggcttccttttcagtatccataggacttgccctgcaagcccacacatgcaaatgctatcctaacccaactctgctcacctcatagcctcttagcccatcagatgccagccaccctccccatcccaactccattcactctgcaacaatagcaatgaacattatggtgaaggtagggaccaccgtgctcaccagggaggatgtcagaggcagatgctcaaggtggtggaggcaggggtgttgtctccatcttattcctgttctgtccattacattgctgcagtgatcaatatttgacactaagaacctcatgtcctatatccaggtccctgtgcatttgagcaaattgtagcccctctctaagccttggtttcctcatgtgtaaaataaaggagttgttaaagggtccttccagctctgactgccttgaatcccatgaaatccaaaatcctaaaatatctcctaaataatcctaaagatttgaggcttctcttccaggggatcctcatgaacttgttactctgttatggatactttcctgcacttaagcaaactatctctctctaaccctctgaacataactcaacttgccattatctttcctcctcacccacccactcaaattcacacagacacacacaaatccccacctcacatacacacacatcccacacacacacatagacacacacaatccccaccccccacacacacatctcacacacacgcacacatacacaaatccccaccccacatacacacacacacacataccccacacacacacacacatcccacacacacacattccctctcacacacacacacaatccccaccccctcacacacacacaatccccacccacacacacacacacacatcctacacacacatacacacaccccacacacacacacatacacacacacacatacaccccaccccagccactcccctgcccacagacgcacacacacatgcccttatttcggttgggatctgccatccccagacatctcgctatctagctttctcttactttgggagaggaacaggagggggataaacccttaatactactttcctgttgtctcctctccttcccactaggtgatcatggtaaccggggatcaccctatcacagccaaggccattgccaaaggcgtgggcatcatatcagagggtaacgagactgtggaggacattgcagcccggctcaacattcccatgagtcaagtcaaccccaggtgaggcctctgcaggaagcccctgtgccctaatcaacacgtcctcttgcacagaaggcttgggtgtcccctgggagtatttggatagcatttctgggacctttataggccttacctctgacactattgtgactggttcctcagccctgagcttgtatccaggctgtgccactgaatacccatgtaaccttggagatgtcacattcccttcctgagcctccattttctcaccacaaaattaggatgccatctccactgctgtaggagtgggatgtgagtaaagaaactagcccagggcctagcaaactgcacttacaactgcgatgatcccatggtgaggatttagactcacattctcaaagagaaatgggggaagtgagtactgaggagaggagaactgaagcaacaggggaagcaggctcagcagggagcctgcaggctgcggtggtgaagagaggcagggggcaggaggggctggtacaggtgccaggggtcagctgtctctgtccccacccaccctccagagaagccaaggcatgcgtggtgcacggctctgacctgaaggacatgacatcggagcagctcgatgagatcctcaagaaccacacagagatcgtctttgctcgaacgtctccccagcagaagctcatcattgtggagggatgtcagaggcaggtgagcacagccacgggaggcagatgacaggcagggaccggggaggcagggacagggccaagacaagcatggagtgagaggcgaggagccaggcttgggaaggggtttcgtcctcaagtgtggccgtcttccctccagggagccattgtggccgtgacgggtgacggggtgaacgactcccctgcattgaagaaggctgacattggcattgccatgggcatctctggctctgacgtctctaagcaggcagccgacatgatcctgctggatgacaactttgcctccatcgtcacgggggtggaggagggtgaggaggctgcatgggttgggatggtttgcaggatactgaagccggcacctctgttccctgtccctttaccccagttgaagaatcattccacaactctaggcagcccagcccactttagcttcccttgaacacaaaatcttcctctcttgggaagacaggcagccatgcttcaggggctgggggtggggaagagtccctctgacctccctgatgccctcagaatctccccacaggccgcctgatctttgacaacttgaagaaatccatcgcctacaccctgaccagcaacatccccgagatcacccccttcctgctgttcatcattgccaacatccccctacctctgggcactgtgaccatcctttgcattgacctgggcacagatatggtgagcgcaggaggtggaggaggggacaggcaaggcaatcgtgatggcacagtggcagggaggagaggtgcactggggcagtggccccagctgtgggggttacaggagacaggcacaggcctggaagacaatggggtctgaatacacgcttttttaactgtgtcaacgatcgtcactgtcgaagatcaattgcttctgtcatctcctacgtcccttcaaatgccctccctgccccatttcctaccccacacaggtccctgccatctccttggcctatgaggcagctgagagtgatatcatgaagcggcagccacgaaactcccagacggacaagctggtgaatgagaggctcatcagcatggcctacggacagatcggtgcgccaagccccgggcctcgggagggaaccccaacagggttcttttcccagctttcagaggaatgagccccaagcaaaattccaggacagaggccagctacccaagggtcagggacctccatctctggccctgaggggctgtgccccttctgcttcctgctctgaccctgcccctgcctttggccctctacccacagggatgatccaggcactgggtggcttcttcacctactttgtgatcctggcagagaacggtttcctgccatcacggctactgggaatccgcctcgactgggatgaccggaccatgaatgatctggaggacagctatggacaggagtgggtgagtggtgctgtgtaaacacagcgcacatgtgtgaaggtacgggaagctgaatgcctggcaggagtggccagtggtggccaactgggactggggctaggggtggatcaggagaaaccatgctaccttctggtcctaccctttcctccgacactctcatctgtctctgcccaccctccctccagacctatgagcagcggaaggtggtggagttcacgtgccacacggcattctttgccagcatcgtggtggtgcagtgggctgacctcatcatctgcaagacccgccgcaactcagtcttccagcagggcatgaagtgagtgcccacccccatggcacctacccacccaggctctgggcacactcaccaacccacacaggccaagcttccaactcagccctggaccagagctgtaaggagggcatcagattttaatcttccatctgtatatccatagataggtttcatatagaagagagaagccatgcttcaggctcctaattttgcattttgttattgtctctctccacctttcttctctccttctctccctcccttctttcccccatctcctacttgagtgccacctgctcctatcctttgcccagccctaaatccagtgtcttctgtgcccacccctcccctggccttccgcaggcagtctagtttatagcacttgcactgtggttctggaggccacgtgctgccgagggtcgggttcagcgcttcttgcagtgtgagttccagcgtgccaggcactgtgctaagtgcctaacacattgtttagccccacgatagctctatgaggtgggtattactgtttacatttcatggataagaggccccaaacaggttaaatgatgtgcccaaggtcaccaagatggtaagggttcaccagatccggggaattctctctcctctttcccttgcaccccaggggtatcccaggatctctgcctccatgatcccccttcacctgccacctcctttctttgcctttcaggaacaagatcctgatttttgggctcctggaggagacggcgttggctgcctttctctcttactgcccaggcatgggtgtagccctccgcatgtacccgctcaagtgagtgtctctttcgggcggcctgagtagtcatacggggggccttcagccccctccaggatccaagttctgatcgctttgaatgctcctttatgtgacagccaccaagccaacctctgatgctgctgacactctcctccattgctttcagagtcacctggtggttctgcgccttcccctacagcctcctcatcttcatctatgatgaggtccgaaagctcatcctgcggcggtatcctggtggtaagcccctccacattccccccagcaaagtgcaagccccaccaccagctcctccctccaggaccacacgcagactccactcccactactggttcctgcttctgttcctcaacaccctcagatcctggggtcccaggtcccaggagccctgactctttcgaacctgttgtctctgccctcttcccatcagattctaaaccccgcctaactcacagttggtctccgaggccctccaccttccacctgaaaccacagaacatcagaattagaagggcctttccaggtcacctagtcccacgtccatattttacagatagaggaggctcagaggtgaatctgttcagggtcgtaaagcaaagaatagcaggactggtactagaacccaggcctcctgatccccactcatcaaccgacaagttattgtttttcctacaagcgttttttaatcacttagtagaggttaaaatatgatggcttacaaaccaaatactgtccaggaatactgtttggtttgacctgtgccatattttgtgtgtgtggggggaggaggggggattaattggtccgatatagaaaatttagggtctttcacataaaatctgaattctcctgaagatcagaagagctgttaatcccatgtccacatctctgcacagcaagaatggacagctgctcccttagactctcgttcgtcacctgaagaggccctgtgggcgtttgcattttcaccctcgacctattctgccccagcctccaatgtgctaaatacaagtctcccctaaaggcaggttcaccctcccttcctttaacctatggccccagctcactggacctccttctcctccctttcaccttcttttttttttttttttttttttttttttttgagacggagtctcgctctgtcgcccaaccaggagtgcagtgcagtggcacgatctcggctcactgcaagctccgcctcctgggttcaagcaattctcttgcctcagcctccagagtagctgggattgcaggcgcatgccactatgcccgactaattttttgtatttttagtacagacagggtttcactgggttagccaggagtcttgatctccgcctgcctcagcctcccagtatgctgggattacaggcatgagccactgcacccagcctccttccaccttcctaagccacttcccccagtgcccttcaccaggcttctccttccacctggcttcagcgacccaagcccctaggaaattgatctcttgcctccttttaagctcatgctgcaatctccactcccaatctctctaacaggctgggtggagaaggagacatactactgaccccattggaagaagaaccaggcatggaaagatggggagctctggaggtgttgtggggatggtgatggagagggatggaaataacgggtggcattgggtggcaacatttggggagagataatgaggcaactcagcaggctaagttgcggggtatataaattggggtgatgaccccatagacctaactgtgaacaatcagattagacactatgtgttagagtccccccgaccagatccttttccatcccactccactatgttgtctattttttctgaggaattaagggttaccccaccctgcccactcccatcccttcaaccccacttcctactgtaatagatcagcatccaaaagcaggaacccatctaaaccagaaggaagccctctcagatcaccccagcctcactccatttcccacttccacccccgttagcttcctgcaggactctatccctggcttccccttcagaccttgcaatcacaaaaggttcttctggtgagtgcaagagcctgagactggaaaaggtggacttgtctcccagtcgaggctggtaagggaccttcagggagagctgggcagacaggtgggagatggaggtagggctggctggaggaaggaaacaacaaaggaagtgaggtagtgccaatgacaggacatttgacatgagtctccagatagatgtcgtggactccagctctacgtcccacattttagaataccccaccagcagaacaaactcagatctcatcagggtagcagcagaggcaggaccagaaggcaatcaagagcttccagaaatgccacacttgtgtgccacagagttccccgctgacccttggttaggggtcctcttagtccacaaggtccggatgtcactcatgtacttaataacacttcaccttctgtaatactaagtcctcagagctccatgctgttctgaaagggatggccacaagttctttcccagcctcttccattccctttcttttcatgcccatcccgatgaacctgcatcattccccgacactgccaagccaaccctggaaaaggagttcgctggccattggctagaatcagggtggagaagttccctgaaccttcctgtctcccagggacatgtatgcttccagggacaagcttaggtcatgaacatggtcagaacctttggacaagaggaaaaatactaagagatttgctttttctgggtgcggtggctcatgcctgtaatcccagcactttgggaggccgaggcaggtggatcatgaggtcaggagttcgaggcgagcctggccaacatggtgaaaccctgtctctactaaaagtacaaaaaattagccagtcatggtggcacacgcctgtaatctcagctactcaggaggctgaggcaggagaattgcttgaacctgtgaggaagaggttgcagtgagctgagatcgtgccattacactccagcctgggcgaaagggtgagactccatctcaaaaaaaaaaaaaatgatttgcttttgacgtcttaggtggcagggctgttccctccaggcaaatgcccttcaaaccgacgatcattgtgcccacttaccctgggctggagagttggtttcaggttcctacaggagatagctttctttcccttactccctatctaacacttttgctctgcaggcagccttgcccattctctaagcctggcttagaaggcactgggaatgtcctgtagagagagacctagataggtcatgcaagtgagaaagacatctgaggaaaatggaagacctaaggcagacaggaaggaagcacaaaagacaagcattgggtcagacccataaaccacctcccaaaggctgtcatttcattgcactggaattttgctttatcagaagcaaggaagtaagggagtcattgccttgggcctgggaatctaagtgggagacaatattaatttggatccgattaattggagattactaactgtggacaaaagtttatctttgcacaatcaataaaaatggcatttttttagtaaattaagagcataaacaatattgctagaggtggcatgtttagtctaccaaaaacaatacttttcaggcactttagaaatatccttttagaagcagcgagtgcatgggctaattatcatcaatctttatgtatttgttaaagaaacatctacaggatctttattggtgaccttttgtaagacattagtttgaggtactacctatctacttgaaaataataaagtggcatttctttatgaaaaaaaaagaaatctcttccataattcagatttctacactttatacttgcctccctcctaaatcgtgatattgaaatatggtg

SEQ ID NO: 6109 - DNA, 2619 bp, Homo sapiens
cctttagaggagcctgagaagaggcagaggaagggcgaaacatggctgctctaggagtccagagtatcaactggcagaaggccttcaaccgacaagcgcatcacacagacaagttctccagccaggagctcatcttgcggagaggccaaaacttccaggtcttaatgatcatgaacaaaggccttggctctaacgaaagactggagttcattgacaccacagggccttacccctcagagtcggccatgacgaaggctgtgtttccactctccaatggcagtagtggtggctggagtgcggtgcttcaggccagcaatggcaatactctgactatcagcatctccagtcctgccagcgcacccataggacggtacacaatggccctccagatcttctcccagggcggcatctcctctgtgaaacttgggacgttcatactgctttttaacccctggctgaatgtggatagcgtctttatgggtaaccatgctgagagagaagagtatgttcaggaagatgccggcatcatctttgtgggaagcacaaaccgaattggcatgattggctggaactttggacagtttgaagaagacattctcagcatctgcctctcaatcttggataggagtctgaatttccgccgtgacgctgctactgatgtggccagcagaaatgaccccaaatacgttggccgggtgctgagtgccatgatcaatagcaatgatgacaatggtgtgcttgctgggaattggagcggcacttacaccggtggccgggacccaaggagctgggacggcagcgtggagatcctcaaaaattggaaaaaatctggcttcagcccagtccgatatggccagtgctgggtctttgctgggaccctcaacacagcgctgcggtctttggggattccttcccgggtgatcaccaacttcaactcagctcatgacacagaccgaaatctcagtgtggatgtgtactacgaccccatgggaaaccccctggacaagggtagtgatagcgtatggaatttccatgtctggaatgaaggctggtttgtgaggtctgacctgggccccccgtacggtggatggcaggtgttggatgctaccccgcaggaaagaagccaaggggtgttccagtgcggccccgcttcggtcattggtgttcgagagggtgatgtgcagctgaacttcgacatgccctttatcttcgcggaggttaatgccgaccgcatcacctggctgtacgacaacaccactggcaaacagtggaagaattccgtgaacagtcacaccattggcaggtacatcagcaccaaggcggtgggcagcaatgctcgcatggacgtcacggacaagtacaagtacccagaaggctctgaccaggaaagacaagtgttccaaaaggctttggggaaacttaaacccaacacgccatttgccgcgacgtcttcgatgggtttggaaacagaggaacaggagcccagcatcatcgggaagctgaaggtcgctggcatgctggcagtaggcaaagaagtcaacctggtcctactgctcaaaaacctgagcagggatacgaagacagtgacagtgaacatgacagcctggaccatcatctacaacggcacgcttgtacatgaagtgtggaaggactctgccacaatgtccctggaccctgaggaagaggcagaacatcccataaagatctcgtacgctcagtatgagaggtacctgaagtcagacaacatgatccggatcacagcggtgtgcaaggtcccagatgagtctgaggtggtggtggagcgggacatcatcctggacaaccccaccttgaccctggaggtgctgaacgaggctcgtgtgcggaagcctgtgaacgtgcagatgctcttctccaatccactggatgagccggtgagggactgcgtgctgatggtggagggaagcggcctgctgttgggtaacctgaagatcgacgtgccgaccctagggcccaaggagcggtcccgggtccgttttgatatcctgccctcccggagtggcaccaagcaactgctcgccgacttctcctgcaacaagttccctgcaatcaaggccatgttgtccatcgacgtagccgaatgaagggcgctggtggcctcccgtacaaacttggacaacacggagcagggagagctcaccatggaatgaaccccccgcccatgctgtccggcctgggaaaccctctccatctcccaaggctgccagacatggactccgggctccagcacatccccctctcctctcccccaggttggggctgggtccaccctgtcctatgacttgatcacttttgcacattccctggccgtttctccccagagctgcctgctctgtgagccccacagccctgctcattcctcacgcccttcaatgctgcaggatggactggcccctgacccagggactctccaaacgggatacaggagagaagctggtctagactgtttgctgatccccaacctgcacggggcattcctgcttctctctcaggccaccacagagggcaggggatggttagtcacctgccccagcactcacaccctaactcaaaataaatgttaaataagtgcgatcacac

SEQ ID NO: 6110 - DNA, 1443 bp, Homo sapiens
gtggctgcagcagcagcggcggcggaaaccctaaagtccgagtccggactacgagtgcgtggcctcctaatccggatcctagtcctgagcgtgtctgtgtgcgagtggacggtcccggacgcgatgaccctgaacggcggcggcagcggagcgggcgggagccgcggtgggggccaggagcgcgagcgccgtcggggcagcacaccctggggccccgccccgccgctgcaccgccgcagcatgccggtggacgagcgcgacctgcaggcggcgctgaccccgggtgccctgacggcggccgcggccgggacggggacccagggtcccaggctggactggcccgaggactccgaggactcgctcagctcagggggcagcgactcagacgagagcgtttacaaggtgctgctgctgggggcgcccggcgtgggcaagagcgccctggcgcgcatcttcggcggtgtggaggacgggcctgaagcagaggcagcagggcacacctatgatcgctccattgtagtggacggagaagaggcatcactcatggtctacgacatttgggagcaggacgggggccgctggttgcccggccactgcatggccatgggggatgcctatgtcattgtgtactcagtgacggacaagggcagcttcgagaaggcctcagaactgcgggtccagctgcggcgtgcacggcaaacagatgatgtgcccatcatcctcgtgggcaacaagagcgacctggtgcgctctcgtgaggtctcggtggatgagggccgggcctgcgcggtggtctttgactgcaagttcattgagacatcagcggcattgcaccacaatgtccaggcgctgtttgaaggtgtcgtgcgccagatacgcctgcgcagggacagcaaagaagccaacgcacgacggcaagcaggcacccggaggcgagagagccttggcaaaaaggcgaagcgcttcttgggccgcatcgtagctcgtaacagccgcaagatggcctttcgcgccaaatccaagtcctgccacgacctctcggttctctaggtcccacccgctcccactatggtgggagacgaacggaagggttggtgggctggcccagccaactgccccgggtgcctcagagcaggctcagactctgggtccctcggagctgccagccgggcacccccaacctcatggtcatggacagatagacagtgctgccctgcgaagtggctctcaggggccagtgagggctgggcccacagagatgcatgcgcaggctcatatgcgtcccaagcagccgcagcgcagccgccgggcaggcctgcgtgccgggagaggactctgccttttttcacagcccgggtgtgcctgccctggagggaggctcttcagtgcggtagctacttgtttacatgcagatttttgtaataaaggctatttcctgataaa

SEQ ID NO: 6111 - DNA, 2108 bp, Homo sapiens
tgtctttcaggttgacagtagcttctaagatgtcccagcaacacacactgccagtgaccctctcccctgccctcagtcaggagctcctcaagactgttcctcctccagtcaatacccatcaggagcaaatgaaacagccaactccactgcctcccccatgccagaaggtgcctgtcgagctcccagtggaggtcccatcaaagcaagaggaaaagcacatgactgctgtaaagggactgcctgagcaagaatgtgagcaacagcagaaggagccacaggagcaggagctgcagcaacagcactgggaacagcatgaggaatatcagaaagcagaaaacccagagcagcagcttaagcaggagaaaacacaaagggatcagcagctaaacaaacagctggaagaagagaagaagctcttagaccagcaactggatcaagagctagtcaagagagatgagcaactgggaatgaagaaagagcaactgttggagctcccagagcagcaggaggggcacctgaagcacctagagcagcaggagggacagctgaagcacccggagcagcaggaggggcagctggagctcccagagcagcaggaggggcagctggagctcccagagcagcaggaggggcagctggagctcccagagcagcaggaggggcagctggagctcccagagcagcaggaggggcagctggagctcccacagcagcaggaggggcagctggagctctctgagcagcaggaggggcagctggagctctctgagcagcaggaggggcagctggagctctctgagcagcaggagggacagctgaagcacctggagcaccaggaggggcagctggaggtcccagaggagcagatggggcagctgaagtacctggaacagcaggaggggcagctgaagcacctggatcagcaggagaagcagccagagctcccagagcagcagatggggcagctgaagcacctggagcagcaggaggggcagcctaagcatctggagcagcaggaggggcaactggagcagctggaggagcaggaggggcagctgaagcacctggagcagcaggaggggcagctggagcacctggagcaccaggaagggcagctggggctcccagagcagcaggtgctgcagctgaagcagctagagaagcagcaggggcagccaaagcacctggaggaggaggaggggcagctgaagcacctggtgcagcaggaggggcagctgaagcatctggtgcagcaggaggggcagctggagcagcaggagaggcaggtggagcacctggagcagcaggtggggcagctgaagcacctagaggagcaggagggacagctgaagcatctggagcagcagcaggggcagttggaggtcccagagcagcaggtggggcagccaaagaacctggagcaggaggagaagcaactggagctcccagagcagcaagagggccaggtgaagcacctggagaagcaggaggcacagctggagctcccagagcagcaggtaggacagccaaagcacctggaacagcaggaaaagcacctagagcacccagagcagcaggacggacaactaaaacatctggagcagcaggaggggcagctgaaggacctggagcagcagaaggggcagctggagcagcctgtgtttgccccagctccaggccaggtccaagacattcaaccagccctgcccacaaagggagaagtattgcttcctgtagagcaccagcagcagaagcaggaggtgcagtggccacccaaacataaataaccacccgcagtgtccagaggccctcagatcgtctcatacaagggaagagagagccactggctccacttatttcgggtccgctaggtggcccgtctcatctgtgaacttgactctgtccctctacatgtctctttaatggggtgagggtgggggagagagggaattattgtccagtgccaaccccaatgaccccaatcccaacctcaggtgagcggagcctctacttgagggactattgttactataggaatccttacttccccagtattgaagctgaatcagtgagtgtgtacaatgatacataataaatcttggaagtct

SEQ ID NO: 6112 - DNA, 4195 bp, Homo sapiens
ttccaccttttggctcttgtaaataatgctgctatgaacatgaatgtacaaacatctgtttgaatccctgcattcaattcttttgcatatatacccaggagcagaatgatggatcatatggtaattctgtgtttatttatttgaggaacaaacttgccgttttccataacagctgcactattttacattcccactaacagtgcattaggcttccaattctctatgccctcaccaacacttgttttctgggttttaaaagaagtagtagtcatccttgtaggtgtcaggtggtatctcattgtcgttttgcttcatgttttcctaaagattagtaattttcatatgcttattgaccatttgtatatcttcttcggagaagtgtctatttgagtctttccccaattttgattggtttgtttgttttttgttgttgagttgtagggattcttttatattctggatattaatcccttatcagatatttgttttacaaatattttctttgtaacaacagaaacacaccacagtcttcaaggttggaagccagttaatctgagtagcattttgttagtggtggggagaggatttgttcctcctgaaatcctggggaattggccacctcctcttctcctcttaggcatgaagcgcgtctggcttctccaaagaactcttcccctccactacctcagagttagcttcctctcttcagccagtgatcctggggtcccagacacaataattaaccaagagagggtgaaaggctccctgctgtgtttatgcaatggctcaggcccttgtgaagtgccgagggaccccaagcagcctccatctcccagggcatggtccatccccagctttcacagaacaggaaagctgtggaggagtgtgggcagcagggtaggaatggatatagcccttggcaacaacacatttccccacaaagcacccacccaaaagaacaacaacgatagttttagtttttagtaatgagaacaatagttctcatgactaaaagccatcagccaggacactgttctcaacccttttgcggtctttggaccctttgaaactctgacagaagccatggaggaatgttctcactgagtgcatgcactcaaaatgatgcattcaacttcaattcagtttcagggatgtatggcctgaccaccaatgcaggggattagcaatcgcaatagtggagagggcatgggagtgggaatctggctggatcaagcaagtggatgccagcagcccagaaaaagagcccccctacctgctttttccttcctgggcactattgcccagcaaatgccttcctctttccgcttctcctacctccccacccaaaattttcattctgcacagtgattgccacattcactggttgagaaacagagactgtagcaactctggcagggagaagctgtctctgatggcctgaagctgtgggcagctggccaagcctaaccgctataaaaaggagctgcctctcagccctgcatgtctcttgtcagctgtctttcagaagacctggtaagtgggactgtctgggttggccccgcactttgggcttctcttggggagggtcagggaagtggagcagccttcctgagagaggagagagaaagctcagggaggtctggagcaaagatactcctggaggtggggagtgaggcagggataaggaaggagagtatcctccagcaccttccagtgggtaagggcacattgtctcctaggctggacttttcttgagcagagggtggggtggtaaggaaagtctacgggcccccgtgtgtgtgcacatgtctctgtgtgaatggacccttccccttcccacacgtgtatccctatcatcccacccttcccaccagaggccatagccatctgctggtttggttatttgagagtgcaggccaggacaaggccatcgcttggggcatgaatcctctgcgtactgccctggccagatgcaaattccctgccatgggattccccagaaggttctgtttttcaggtggggcaagttccgtgggcatcatgttgaccgagctggagaaagccttgaactctatcatcgacgtctaccacaagtactccctgataaaggggaatttccatgccgtctacagggatgacctgaagaaattgctagagaccgagtgtcctcagtatatcagggtgaggaggggctgggtgtggcgggggctctctgcctggtcctggggctgccctgggccagcggtcctccctgccacccttcatagatgctatgcctcggctctctctgagatctttaaactctggcttcttcctcctcaatcttgacagaaaaagggtgcagacgtctggttcaaagagttggatatcaacactgatggtgcagttaacttccaggagttcctcattctggtgataaagatgggcgtggcagcccacaaaaaaagccatgaagaaagccacaaagagtagctgagttactgggcccagaggctgggcccctggacatgtacctgcagaataataaagtcatcaatacctcatgcctctctcttatgcttttgtggaatgaggttcctcggtgtggagggagggttggaaaacccaaaggaagaaaaagaaatctatgttatcccaccctacctctcacaagcctttcctgctttacccctcacctggcctctgccccacattccttcagcccctcatttcgagcattggatttgaggcttaaggattcaaaaagtcgtcatgaatatagctgatgattttatagtggttctgaaatgggtcggggatttgggaacagggtggtagtataagaacaactgatactgttctctaagctaaatcttagcttccagctacctgtcttagatgtggctcttgggaaccttagagtgatagctacatagaagtgtgtgggtgtgtgtgtgtgtgtctgtgtgtgtgtgtgtgagagagagacagacagaaagagagcaagagagggaaggggggagaggctgattgtgtgtgtggtgtgatgtaggtggacaatgttcagagtcctccattaacaggataatcctcacacctgtccacatacctgtagtttgtccttggggattttgaaaatttttcctccctctccactcccaaactcccaactcaattaaatgataaaggaataggcaaataggaaaataaattagtaaaacttaagtcaaagaataggttattcatacgctgcctatgggattctatgctttgtgatcagaaaattatctaaaaaatacttcccaagggctggtacaagggaggccagaagacgagtggttcttctctgaggtggacattaaaaaaagaagaaaatgaaggggaaccttttgacaagaatgtcaccccaaactggattttcatgctgtggtgtggggaattttctgttgtcctcacttaggtgctggggcagtggtgttagtgatgggtaaaaaggtaggaagctgtcacagaatcactaaaccagggttcttaacttgtctgtctatacatctctgaaattgggttgaagttgtgtgcatcattttgagtgacgcactgagaacattcctccacggcttccatcgagagtctcgaaaaggcccaacacctcaaaaaggttaagaacacttgtcctgcttactggtttttagtaacaaatggcagagtatttctctctgtctctctctctttttttttttttttttttgagacacagggtcttgtctgtcacgtggactagagtacaatgggcatgatcatgggctcactgtagcctcgaacacctgggctcaagtaatcctcccacctcagcctctttagtagctgggactacagcatgagccactgcccttggctaatttttaaattatttttttgtagagatggaaacttgctatgttgcccaggctagtctcaaactcctggactcaagcgatcctcctaccttggcctcccaaagtgctgagattacagtgtgatccacaccacacctggccaaagattggagtatttttattgctattgttgtgctgggtgggtgggtgggtgtatgctttgtggggacgtgtgttgttgccaagggctaaatcagttcctaccctgctgcccacagtcctccacagctttcctgctctgtgaagctaaggatacaccccgatgataagctgtcaacata

SEQ ID NO: 6113 - DNA, 3097 bp, Homo sapiens
ggccagaaacagctctcctcaacatgagagctgcacccctcctcctggccagggcagcaagcttagccttggcttcttgtttctgctttttttgctggctagaccgaagtgtactagccaaggagttgaagtttgtgactttggtgtttcggcatggagaccgaagtcccattgacacctttcccactgaccccataaaggaatcctcatggccacaaggatttggccaactcacccagctgggcatggagcagcattatgaacttggagagtatataagaaagagatatagaaaattcttgaatgactcctataaacatgaacaggtttatattcgaagcacagacgttgaccggactttgatgagtcgtatgacaaacctggcagccctgtttcccccagaaggtgtcagcatctggaatcctatcctactctggcagcccatcccggtgcacacagttcctctttctgaagatcagttgctatacctgcctttcaggaactgccctcgttttcaagaacttgagagtgagactttgaaatcagaggaattccagaagaggctgcacccttataaggattttatagctaccttgggaaaactttcaggattacatggccaggacctttttggaatttggagtaaagtctacgaccctttatattctgagagtgttcacaatttcactttaccctcctgggccactgaggacaccatgactaagttgagagaattgtcagaattgtccctcctgtccctctatggaattcacaagcagaaagagaaatctaggctccaagggggtgtcctggtcaatgaaatcctcaatcacatgaagagagcaactcagataccaagctacaaaaaacttatcatgtattctgcgcatgacactactgtgactggcctacagatggcgctagatgtttacaacggactccttcctccctatgcttcttgccacttgacggaattgtactttgagaagggggagtactttgtggagatgtactaccggaatgagacgcagcacgagccgtatcccctcatgctacctggctgcagccccagctgtcctctggagaggtttgctgagctggttggccctgtgatccctcaagactggtccacggaggttatgaccacaaacagccatcaaggtactgaggacagtacagattagtgtgcacagagatctctgtagaaagagtagctgccctttctcagggcagatgatgctttgagaacatactttggccattaccccccagctttgaggaaaatgggctttggatgattattttatgttttaggggacccccaacctcaggcaattccatcctcttcacccgaccctgcccccacttgccataaaacttagctaagttttgttttgtttttcagcgttaatgtaaaggggcagcagtgccaaaatataacagagataaagcttaggtcaaagttcatagagttcccatgaactatatgactggccacacaggatcttttgtatttaaggattctgagattttgcttgagcaggattagataaggctgttctttaaatgtctgaaatggaacagatttcaaaaaaaaccccacaatctagggtgggaacaaggaaggaaagatgtgaataggctgatgggcaaaaaaccaatttacccatcagttccagccttctctcaaggagaggcaaagaaaggagatacagtggagacatctggaaagttttctccactggaaaactgctactatctgtttttatatttctgttaaaatatatgaggctacagaactaaaaattaaaacctctttgtgtcccttggtcctggaacatttatgttccttttaaagaaacaaaaatcaaactttacagaaagatttgatgtatgtaatacatatagcagctcttgaagtatatatatcatagcaaataagtcatctgatgagaacaagctatttgggcacaacacatcaggaaagagagcaccacgtgatggagtttctccagaagctccagtgataagagatgttgactctaaagttgatttaaggccaggcatggtggtttacgcctataatcccagcattttgggagtccgaggtgggcagatcacttgagctcaggaggtcaagatcagcctgggcaacatggtgaaaccttgtctctacataaaatacaaaaacttagatgggcatggtggtgtgtgcctatagtccactacttgtggggctaaggcaggaggatcacttgagccccggaggtcgaggctacagtgagccaagagtgcactactgtactccagccagggcaagagagcgagaccctgtctcaataaataaataaataaataaataaataaataaataaataaataaataaaaacaaagttgattaagaaaggaagtataggctaggcacagtggctcacacctgtaatccttgcattttggaaggctgaggcaggaggatcactttaggcctggtgtgttcaagaccagcctggtcaacatagtgagacactgtctctaccaaaaaaaggaaggaagggacacatatcaaactgaaacaaaattagaaatgtaattatgttatgttctaagtgcctccaagttcaaaacttattggaatgttgagagtgtggttacgaaatacgttaggaggacaaaaggaatgtgtaagtctttaatgcccgatatcttcagaaaacctaagcaaacttacaggtcctgctgaaactgcccactctgcaagaagaaatcatgatatagctttgccatgtggcagatctacatgtctagagaacactgtgctctattaccattatggataaagatgagatggtttctagagatggtttctactggctgccagaatctagagcaaagccatccccgctcctggttggtcacagaatgactgacaaagacatcgattgatatgcttctttgtgttatttccctcccaagtaaatgtttgtccttgggtccattttctatgcttgtaactgtcttctagcagtgagccaaatgtaaaatagtgaataaagtcattattaggaagttcaaaagcattgcttttataatgaactt

SEQ ID NO: 6114 - DNA, 2320 bp, Homo sapiens
cttcctgaaaggatctggagacaccagctccacaagtcctggtgtctttaaaaggatcagcttgaggaataaggctcgtctgagagctgtgacattcatctgactctagtgaaagtccaacagccactccctttttggcctccaactgggcaccatgagggcctgcatctccctggtattggccgtgctgtgtggcctggcctgggctgaggaccacaaagagtcagagccattgccacagctggaggaagagacagaagaggccctcgccagcaacttgtactcggcacccacctcctgccagggccgctgctacgaagcctttgacaagcaccaccaatgtcactgcaatgcccgctgccaagagtttgggaactgctgcaaggattttgagagcctgtgtagtgaccacgaggtctcccacagcagtgatgccataacaaaagaggagattcagagcatctctgagaagatctacagggcagacaccaacaaagcccagaaggaagacatcgttctcaatagccaaaactgcatctccccgtcagagaccagaaaccaagtggatcgctgcccaaagccactcttcacttatgtcaatgagaagctgttctccaagcccacctatgcagccttcatcaacctcctcaacaactaccagcgggcaacaggccatggggagcacttcagtgcccaggagctggccgagcaggacgccttcctcagagagatcatgaagacagcagtcatgaaggagctctacagcttcctccatcaccagaatcgctatggctcagagcaagagtttgtcgatgacttgaagaacatgtggtttgggctctattcgagaggcaatgaagagggggactcgagtggctttgaacatgtcttctcaggtgaggtaaaaaaaggcaaggttactggcttccataactggatccgcttctacctggaggagaaggagggtctggttgactattacagtcacatctacgatgggccttgggattcttaccccgatgtgctggcaatgcagttcaactgggacggctactataaggaagtgggctctgctttcatcggcagcagccctgagtttgagtttgcactctactccctgtgcttcatcgccaggccaggcaaagtgtgccagttaagcctgggaggatatcccttagctgtccggacatatacctgggacaagtccacctatgggaatggcaagaagtacatcgccacagcctacatagtgtcttccacctaatagaacttcgagccagaaaggggcatgagggctcttgcgagactgaagtgctatcttctctggactagagagaagagggagaggactggaagggatcaccaaatctcaaagcaatgagaagcattcctaaatcccaaagtgcccacatgggaaagagataaaatgtacaaattagaaaaatgtggataaacagtcaaacctttatcctctagaattttggcaatgttgactaagaaacagagtccaagcagagaaggtaggaaccctccatagctctctgccctgatgtgtgggggaactaggaagaagtcctttgacctcaccaggcctcatgcttccctttaatgtaaagggaaggggtttgcccactttcctctttttggggttggtgagagggcaaaccctgatatttttactgtgaaggtgttttcagttgttcttaggaagaacagctgatagaaattcaagattactataatggctgttattatacacagctctgtaaactaccactcagccctgtgttggggtcctcaaagaagtaaggccacagtaatcaagcaagggcctttggttttttccagagttagatcctctcagaacagagtctgggagaactccaatgctgaatggagaagggtaataggttggttgcagtgaatgggctgggggtggggtggccttctccaggcctgagtgtttttgtgtccagctcagtatctgcaacaagaagtttcccacttgtggatgtttagtgcagccacagacttgtattttgatccccaattttttttgaaagagttctcctcataggaggatgattcagcatcagaagaagaaggaacccatagcttggtgtcattaacataattattttaagccttatccagcagccataatttgaataactctacgagaccagagagactgtagttccctattttaacctcaattatgcatttgtccccaaccccactgagaactaaatgctgtaccacagagccgggtgtgaactatggtttagaaggttcaagtttccaattaaagtcattgaag

SEQ ID NO: 6115 - DNA, 2554 bp, Homo sapiens
gcgccatgagccggagtctcttgctccggttcttgctgttcctgctcctgctcccgccgctccccgtcctgctcgcggacccaggggcgcccacgccagtgaatccctgttgttactatccatgccagcaccagggcatctgtgtccgcttcggccttgaccgctaccagtgtgactgcacccgcacgggctattccggccccaactgcaccatccctggcctgtggacctggctccggaattcactgcggcccagcccctctttcacccacttcctgctcactcacgggcgctggttctgggagtttgtcaatgccaccttcatccgagagatgctcatgcgcctggtactcacagtgcgctccaaccttatccccagtccccccacctacaactcagcacatgactacatcagctgggagtctttctccaacgtgagctattacactcgtattctgccctctgtgcctaaagattgccccacacccatgggaaccaaagggaagaagcagttgccagatgcccagctcctggcccgccgcttcctgctcaggaggaagttcatacctgacccccaaggcaccaacctcatgtttgccttctttgcacaacacttcacccaccagttcttcaaaacttctggcaagatgggtcctggcttcaccaaggccttgggccatggggtagacctcggccacatttatggagacaatctggagcgtcagtatcaactgcggctctttaaggatgggaaactcaagtaccaggtgctggatggagaaatgtacccgccctcggtagaagaggcgcctgtgttgatgcactacccccgaggcatcccgccccagagccagatggctgtgggccaggaggtgtttgggctgcttcctgggctcatgctgtatgccacgctctggctacgtgagcacaaccgtgtgtgtgacctgctgaaggctgagcaccccacctggggcgatgagcagcttttccagacgacccgcctcatcctcataggggagaccatcaagattgtcatcgaggagtacgtgcagcagctgagtggctatttcctgcagctgaaatttgacccagagctgctgttcggtgtccagttccaataccgcaaccgcattgccatggagttcaaccatctctaccactggcaccccctcatgcctgactccttcaaggtgggctcccaggagtacagctacgagcagttcttgttcaacacctccatgttggtggactatggggttgaggccctggtggatgccttctctcgccagattgctggccggatcggtgggggcaggaacatggaccaccacatcctgcatgtggctgtggatgtcatcagggagtctcgggagatgcggctgcagcccttcaatgagtaccgcaagaggtttggcatgaaaccctacacctccttccaggagctcgtaggagagaaggagatggcagcagagttggaggaattgtatggagacattgatgcgttggagttctaccctggactgcttcttgaaaagtgccatccaaactctatctttggggagagtatgatagagattggggctcccttttccctcaagggtctcctagggaatcccatctgttctccggagtactggaagccgagcacatttggcggcgaggtgggctttaacattgtcaagacggccacactgaagaagctggtctgcctcaacaccaagacctgtccctacgtttccttccgtgtgccggatgccagtcaggatgatgggcctgctgtggagcgaccatccacagagctctgaggggcaggaaagcagcattctggaggggagagctttgtgcttgtcattccagagtgctgaggccagggctgatggtcttaaatgctcattttctggtttggcatggtgagtgttggggttgacatttagaactttaagtctcacccattatctggaatattgtgattctgtttattcttccagaatgctgaactccttgttagcccttcagattgttaggagtggttctcatttggtctgccagaatactgggttcttagttgacaacctagaatgtcagatttctggttgatttgtaacacagtcattctaggatgtggagctactgatgaaatctgctagaaagttagggggttcttattttgcattccagaatcttgactttctgattggtgattcaaagtgttgtgttccctggctgatgatccagaacagtggctcgtatcccaaatctgtcagcatctggctgtctagaatgtggatttgattcattttcctgttcagtgagatatcatagagacggagatcctaaggtccaacaagaatgcattccctgaatctgtgcctgcactgagagggcaaggaagtggggtgttcttcttgggacccccactaagaccctggtctgaggatgtagagagaacaggtgggctgtattcacgccattggttggaagctaccagagctctatccccatccaggtcttgactcatggcagctgtttctcatgaagctaataaaattcgccc

SEQ ID NO: 6116 - DNA, 1163 bp, Homo sapiens
ctctacctgacacagctgcagcctgcaattcactcccactgcctgggattgcactggatccgtgtgctcagaacaaggtgaacgcccagctgcagccatgaagatctgtagcctcaccctgctctccttcctcctactggctgctcaggtgctcctggtggaggggaaaaaaaaagtgaagaatggacttcacagcaaagtggtctcagaacaaaaggacactctgggcaacacccagattaagcagaaaagcaggcccgggaacaaaggcaagtttgtcaccaaagaccaagccaactgcagatgggctgctactgagcaggaggagggcatctctctcaaggttgagtgcactcaattggaccatgaattttcctgtgtctttgctggcaatccaacctcatgcctaaagctcaaggatgagagagtctattggaaacaagttgcccggaatctgcgctcacagaaagacatctgtagatattccaagacagctgtgaaaaccagagtgtgcagaaaggattttccagaatccagtcttaagctagtcagctccactctatttgggaacacaaagcccaggaaggagaaaacagagatgtcccccagggagcacatcaagggcaaagagaccaccccctctagcctagcagtgacccagaccatggccaccaaagctcccgagtgtgtggaggacccagatatggcaaaccagaggaagactgccctggagttctgtggagagacttggagctctctctgcacattcttcctcagcatagtgcaggacacgtcatgctaatgaggtcaaaagagaacgggttcctttaagagatgtcatgtcgtaagtccctctgtatactttaaagctctctacagtccccccaaaatatgaacttttgtgcttagtgagtgcaacgaaatatttaaacaagttttgtattttttgcttttgtgttttggaatttgccttatttttcttggatgcgatgttcagaggctgtttcctgcagcatgtatttccatggcccacacagctatgtgtttgagcagcgaagagtctttgagctgaatgagccagagtgataatttcagtgcaacgaactttctgctgaattaatggtaataaaactctgggtgtttttcaaaaaaaaaaaaaaaaa

SEQ ID NO: 6117 - DNA, 2488 bp, Homo sapiens
cggcccaacgaggcgctggtggtttcagggggctgttgtggttccgactataaacagtacgtgtttggcggctgggcctgggcctggtggtgtatctccgacactcagaggatttccctagagattatgacgttgcagccccgctgcgaggacgtagagacggccgagggggtagctttaactgtgacgggtgtcgcccaggtgaagatcatgacggagaaggaactcctggccgtggcttgtgagcagtttctgggtaagaatgtgcaggacatcaaaaacgtcgtcctgcagaccctggagggacatctgcgctccatcctcgggaccctgacagtggagcagatttatcaggaccgggaccagtttgccaagctggtgcgggaggtggcagcccctgatgttggccgcatgggcattgagatcctcagcttcaccatcaaggacgtgtatgacaaagtggactatctgagctccctgggcaagacgcagactgccgtggtgcagagagatgctgacattggcgtggccgaggctgaacgggacgcaggcatccgggaagctgagtgcaagaaggagatgctggatgtgaagttcatggcagacaccaagattgctgactctaagcgagccttcgagctgcaaaagtcagccttcagtgaggaggttaacatcaagacagctgaggcccagttggcctatgagctgcagggggcccgtgaacagcagaagatccggcaggaagagattgagattgaggttgtgcagcgcaagaaacagattgccgtggaggcacaggagatcctgcgtacggacaaggagctcatcgctacagtgcgccggcctgccgaggccgaggcccaccgcatccagcagattgccgagggtgaaaaggtgaagcaggtcctcttggcacaggcagaggctgagaagatccgcaaaatcggggaggcggaagcggcagtcatcgaggcgatgggcaaggcagaggctgagcggatgaagctcaaggcagaagcctaccagaaatacggggatgcagccaagatggccttggtgctagaggccctgccccagattgctgccaaaatcgctgccccacttaccaaggtcgatgagattgtggtcctcagtggagacaacagtaaggtcacatcagaagtgaaccgactgctggccgagctgcctgcctctgtgcatgccctcacaggcgtggacctgtctaagatacccctgatcaagaaggccactggtgtgcaggtgtgaggctcctacaggcccactctcttcagcagccacccggccctccctccagcacccgttttaatcccacagaacaacgggaacgttactgactctggtgccttatctcgaagggaccagaagtgctgcgtgttcaggccatctctggctgtcttcctgtctctcctgtctgtccacctcctcctcttcctctcctttaccccactttcactgccactttcatcaggtttgtgtctcatctccctgcgtgtcttttcctttgtctgtctttttctttcccccatgcacatcatgtagattaagctgaagatgtttattacaatcactctctgtggggggtggccctgctgctcctcagaatcctggtgccttgaagttctctgtgcatctgtccatcctccctatggccctggccagagctcagcatgggcaggggttctgggtaggacggtcactgtcctctctcctggactggtcttcccagccctaaaccctgccccaggaagcccacagcctcacctgctgctgcccctctaggtctgggcagccatgacctgcagggcccagagacactgtccttcccctcatccacccaaggccccagccagcgctcataccctgtcctttctccctgaccccaagggcacagaggcaaggcctcctgtctacagcagcttcctcagtttcctactgccttaggaggcccctgcttgtgctcagggaaggcctcttcatgggcatgttcctgctggggcggtgcggtttggtcccaactctgctaagttttctgagatgagggtctagccctgttggggacagaaaagtgtgtagaccttcttcctgctagggctgcactgtcctgggtgttgggcccttctggtggacaaggctgtgccaaccctgtacagaatcgagtgctgtagcctggccagaccccagagcccttgtgccatctttcttcctggccagagtgatggggttccagccatggggaagcaacccaatcctctgtctccttgctccaatggaggcagaagagcccaggacccaagcgtcttggcaggggtgctgtgaatgtccagtggtcccagctccccaccctggccctgccccagcctgtgtagctcttcctgcatgtggatgctgcatgtctggtctggggcttggatgttgcactgccccactgcctgtcccttctggtaaaataaagaactcttaatgcccg

SEQ ID NO: 6118 - DNA, 14537 bp, Homo sapiens
ctggtaggaatcagcctggtgccaggggccatcacagcggtggctcccaccaaagcccagcctaagcccccagacctcacccctgctccctccctagcatcttctccccatttcccgcccagaggcctggcctcttctctccgccccctacagcagtttggcccctccctcccacataagtcacttaccaggtctgtccctgcggcatccagtctgtgggtcctgtcccatccatcctgacctgttccatctcagccccaggactcagtactgcggttgccaacactgctgccaggtgaggggctcccacgggtactgtggtgccgagtccaggcggcccacactatcagaggccgtgcctggatccagcaaggtggggtgtgggccagctgtgtacctgtcagccccagctaggctgttcccaacaccaagactctgctttccctgtgcacaggctccggcacctgccatgccctacccctcctggcagccccaagtggggtcttccctgacttgggaatgccaaggaccacaggccccggggtcacttgtctgtcttgtgaggaaccttgagttgggggatttctgctaagaaatgagttctagaagctgtcagtgttgtgcacctctagactgcagagctagcaggtggacggaccaggcccagggatgctggagcactctgatgtgtgtgcagctgggtcttgaggctgggacaagtgtccatgcagggaactatgtggatttcctgggatggatcgttgagtgggtttcttcattgggcagtttttcggatgttgtttggtgggggtgaggggaaggcttttctctgcagcatgagaagcttctctgggtgagtctgaatggtcttcgcggaaggtctctggatgtgtctggagaatctctgggccaaggtgggattgtttcggtcatcgggtgggactgaatcagctgtctggatggagggtttctgggtcaactggctgggactacctgggttaaggagccaccctgcctcttcctaacaggcatgatggatgggccacgttccgatgtgggccgttggggtggcaaccccttgcagccccctaccacgccatctccagagccagagccagagccagacggacgctctcgcagaggaggaggccgttccttctgggctcgctgctgtggctgctgttcatgccgaaatgcggcagatgacgactggggacctgaaccctctgactccaggggtcgagggtccagctctggcactcgaagacctggctcccggggctcagactcccgccggcctgtatcccggggcagcggtgtcaatgcagctggagatggcaccatccgaggtgaggccggtctgtcctcctcagctgagagctaaaaggctttaatgggaccagagactcagcctggcatttctgggggggataggaagctaatgataagggcctgggctcctcatggggcttcactgacacggagctgtgtccttgcagagggcatgctagtagtgaacggtgtggacttgctgagctcgcgctcggaccagaaccgccgagagcaccacacagacgagtatgagtacgacgagctgatagtgcgccgcgggcagcctttccatatgctcctcctcctgtcccggacctatgaatcctctgatcgcatcacccttgagttactcatcggtcagtggggcttggattgggacgggtgaaggccctatgtttggtggggagaggctggcattagggtcagagaggtctttaggctcctccctgccccactcctcacctctgccagataaggcaggtgcaagtgtgtgggtgtgcccctggggttgtgtctcagagagggtcttggtgttgcagtttttcccaagcccatcctcctcaagcctcctggggcatcggtctcagagtactcctcttcagggcctgcctcggtgcctccttcggcattgctgctctgtcctttgtgcatctgttctcattccccaggatgtggctggttctctcttctatctctctctctccctcttgccttccatgtcccccatctctgccaattctgtctctctctgtctctgtccctctgtccccatgacccaaggcaggtgcctccctcaccgcgttgcttggtgtagcttgacttctcaggctggtgattatgctgctgcctggggcaggtgactccttttaccctttgattagggcctaaccttgcccacctcatcctttaatttcccaggaacccctaccacctccaccagggatgccctgggctctggaagctgcagccccaggaagcaggcagggttggccttcaggatcaggactgccctttcatacggggcaggtggatctgcccctccagcccaggcactgtgatagtcaggcaggcagaaggtgacaggagccctcgtctctcctccccacctcagagttcagtgtcaggggaacaggtttgggatgttggactgcggcactgccctaacatgtgggcaagcattgggtggagacagagctgctctaagggagactgtcagagaataaggtgatggcccaacgtaggggacatacacagtggctcatacacattgtgggtggggccgggagaagtcccaggctccatcccctctcctcagggaggccttgccagctaattgctgatttcctactctaggaaacaaccccgaggtgggcaagggcacgcacgtgatcatcccagtgggcaaggggggcagtggaggctggaaagcccaggtggtcaaggccagtgggcagaatctgaacctgcgggtccacacttcccccaacgccatcatcggcaagtttcagttcacagtccgcacacaatcagacgctggggagttccagttgccctttgacccccgcaatgagatctacatcctcttcaacccctggtgcccaggtgagcagctggggtctggagcagagggtagatgggagggaaagacagggaagggcttcctgccctcggatgtggcggggtgcctaggtgcctgaccccaggagaagccagcctcccattgggcagatgagaggaccgaggcctggtgcagaaaggtggccagcccagggtcacacagccagccacacctctcctggcaaaggcccctggctacagccaatctcctccaccatctgtcatgctccccgtgtcctcccacagcagtcctgtcaggctaggggcatccccgcattttcttctgtggacatgagtcctgcagaactggccagaagtaggtgaggcccagggagagaactggagggaaccagttttgtgtgttctggggacacagaggacattgtgtacgtggaccatgaggattggcggcaggagtatgttcttaatgagtctgggagaatttactacgggaccgaagcacagattggtgagcggacctggaactacggccaggtatggtgcggctggccagggtcacatacacccagaggagctggggtgggtgtgggggctggggtattggagcagggtgctggcctagggttcaggctgtcacctctgccctccatccctccttccagtttgaccacggggtgctggatgcctgcttatacatcctggaccggcgggggatgccatatggaggccgtggagacccagtcaatgtctcccgggtcatctctgccatggtgagcaccctcacatctctgagtcctactgtgtgtgtgcctgctgcctcgccacacccccaccctcctcctgccctttctggattcctcaagaacccccagccctgtccctgccctcgtaaaggatacttcaggaaggggtctccctcctcttctctcccttgcctgccccccaccccgcctttcctggctcctgtcccagctcctgtggaatgtagggccaaacccaaaacttggcacacccaggattcacattcctgtgtcagagcccgggtgggaggggggcagatggctgagggaagggctgggtggagctcaggctggtgtctggatcctgaggcatttaggggtaaggggtggttgcaggatcggggcccggctggtccccatggaccacatggcaggtcctgagcccctcctccacctccgccctatctcatcctgtcctgggcaggtgaactccctggatgacaatggagtcctgattgggaactggtctggtgattactcccgaggcaccaacccatcagcgtgggtgggcagcgtggagatcctgcttagctacctacgcacgggatattccgtcccctatggccagtgctgggtctttgctggcgtgaccaccacaggtagtggagggactgggacaggagtggcccgggccctacagggagaagggaggaaagccaggcttacccagccctgcccagatgtggctacagtgcagggtgcaggcgggggtgggtaataggctggccttaattatcattaattagtgttaacaacagagagaggcctaagggaaaggagggagaagggacaggcaaggactgagccaggcaggtggcctagcttcccctgaccccaagtgctctgtagcccaaagcttgtggcccccgtggccctgaccctggagtctatgcccagcttggcaatcctagttgcccttctccccctgatactcctgacacgatgcctcacttgcccccaacccatgccttgaaccccaaccttcgctcctccacagtgctgcgctgcctgggtctggccacccgtactgtcaccaacttcaactccgcccacgacacagacacatcccttaccatggacatctacttcgacgagaacatgaagcccctggagcacctgaaccatgattctgtctggtgagctggggtggactgcccatctgtgctgaagaatggtgacctgagctttggaggtggagggtgggcagggctggggaggctggggaaactgaggactcctgaccctggggctcagacccagcccctcctccatgtccatccaggaacttccatgtgtggaacgactgctggatgaagaggccggatctgccctcgggctttgatgggtggcaggtggtggatgccacaccccaagagactagcagtggtaagctgggccccccactccccaccatgcccctgcttatctcccccacctgattaacacagtccagagtgtcagtgctgggccgggccggagagccaagccatgtaaccccgcggcttcttaaacgggtttgtcagctgaaccaccacgtggatgttagtttatttttaccattctatataactctctatttgcctacattttacttatttataatggtttattttatttataatggttaatatacaagggaggttcaaaattcaaaagctggaagagtattcagagaaagaattcatattcactattcttacttgctttttaacttacatatcctggagataattaactgaaggaccattttaaagtcatttttataagtaatacatgcttggaaggaaaaaaaaagtatagaattgaacaacacaaaatgtaaagcttccctattctctctcaggaggtatttgggttttttttcaaaaatatttttaaagtaaatttctaggttctactccaaacctgatacattagactttcccaggatagatgctaacaatgtatatttttgaaagttcttctggtgattctgacgatcagccggattttttgacccactccaaagggtggccagagagatggagtgacctcctctggggcacagagtggtaggtcagtgacagagcaagtccagtccttttaagcacatactcttgctttcaacgagttccttcctgtctgttccattgctcactgtgagttatatatacagcatagaaaaaaatcagggctcagataggttcaaagaagaaaatagcccttatgaccctgccttaatatataattactgttaatataaccaagggtctcttttctgtgtccacatacatgtgtttctgcagaaattagaactaccatacactctgttctcaaacaaacccccaccccttcttaccgtgataccccagccccagccaccaggcctgccctgccagctaccttctgtccagcctctcccttaccccaggtcagagagtcctccctagcctacattcctcccctggcctcttcccagtgccctccctctcactcagatatgtgaacacagccccatgagctgtgcaacccggtgatgcctgtgatgctgaaacagcctgtcccagacgctggcagatctgagctctggcccccaactctgggaagtggtggggtggacatcaggcagggggctcagggccagccagactggggcttgatcccagcctgatcacttctcagatgtatgctcttgggcaagcacctcgaacttttaggctttggtggtttggatgtaatttggggtaatagataccatatatggtgattgggaggattaaatgagaaattctgtatctgaagggaccagcagcatgccgggagtgtagcagctactcaaaaagtctgagctcctttcattctccctgcaccacctgtcttgtgagatcctggcatgaacttcaccttgctgtttccccgtctgtaaaggagtgtgtagtgttatgtcttgtctaagattctttccggttggatggtactcacttaccactctgtcctctcctgccaggcctcttcctgtcagcctatctcttctagacagcctcctgagtatcataagggcagactctatttcccaccagctccccccagtagaaagggcagcaggctgcagagctgagggttgttccgcatctctctggaatggtggtggcggtggtgtcctcgctctcccagccagcaggcagggccactgtggactctgggttggttatgataaaggatggggcgtcctgtcctctgggggtcacagatggtggacatccagtgtcagccagccatgaaagagtatgtcagggacttggttatcaggcaggctggtccgcacatctgtaccctgcccccatcctccagcagagcagcctgggctgaggaaagcagattgagagccaaatggagccgctctctctttgttttccatacctgtgttgcactggctgtcaactgacccccaagtgtttgggtcagggctgatgaccttgttccagaggccaccaggcagtgggaccgggcctgagtgggtgggctggggccctgtgtggaccttacccagggtctgaagagccctctccgccttctcagatctcttgcctctgtcccgcctcactctctaggcatcttctgctgcggcccctgctctgtggagtccatcaagaatggcctggtctacatgaagtacgacacgcctttcatttttgctgaggtgagggctgggctccaggtgccttcttgggcttcagtcatgggttctctggtcccaacttcaccgctgactgaccagctctgcgacccggggcaagtcactcattatacaagtcagtttcctcacctgtaaaaggggataatcaaggctgccttgcttcctatactcgggatcagaagagataacgggtatgaaactgcttcactagtcgtaaagtcagccattgagtgtgagggattactgatattgccaaagtgctctgccaggagcctcccagaccagcttcttccctgcactctggcctcgtctggctcgtcttggaaagtctccccttggctctgccaggaagctcccacccttgggaccaagccctgtcccatagctcctgggatcaggggaaggaggccgggagtcaggccaccctcagaccctctggctcactcattcctgctcacccccaccccccacaggtgaatagtgacaaggtgtactggcagcggcaggatgatggcagcttcaagattgtttatgtggaggagaaggccatcggcacactcattgtcacaaaggccatcagctccaacatgcgggaggacatcacctacctctataagcacccagaaggtaccattcccccaacccagccagctctgggccccacaacaagtgttcctgccaagtgcttggccacccacgtgggaattggaacctcacccttgaccctcaacccccaggctcagacgcagagcggaaggcagtagagacagcagcagcccacggcagcaaacccaatgtgtatgccaaccggggctcagcggaggatgtggccatgcaggtggaggcacaggacgcggtgatggggcaggatctgatggtctctgtgatgctgatcaatcacagcagcagccgccgcacagtgaaactgcacctctacctctcagtcactttctatactggtgtcagtggtaccatcttcaaggagaccaagaaggaagtggagctggcaccaggggcctgtaagtgctccttacccagccctgccccctggatggctgggcacctcagggctgtggacatggagaccccaggagcagtggggagtccctgggggaagcctcatgtagggaagcaggcctcagtgacgccatgcctcttctccacagcggaccgtgtgaccatgccagtggcctacaaggaataccggccccatcttgtggaccagggggccatgctgctcaatgtctcaggccacgtcaaggagagcgggcaggtgctggccaagcagcacaccttccgtctgcgcaccccagacctctccctcacggtgaatgcagtttgctggggcatgaggggtggtcagagagtgaaggccaggggataaggacatcagaggtgggcgctaagccagcagcaggctggcctgatgagcctttgtaggagaaggtcaaggaccggctctggggcctcagtttcctcatctgtagcatgggatcttatgtctctggttctgtgacagcctttattgaggaataggttggagtttcttctctgacttctggggaatcttctctcaggaggataaatgtgggactcggggaggttttgcttctaagcagcttcccctctctggtgcagtgtacggtccccgtgtgtttggccagggtctctgacgtgggggatgggcctctttttctctcagttactgggagcagcagtggttggccaggagtgtgaagtacagattgtcttcaagaacccccttcccgtcaccctcaccaatgtcgtcttccggctcgaaggctctgggttacagaggcccaagatcctcaacgttgggtgagtctggcctctccccctacccctgcttccactctggccttccccacaggctgccctggctcccagctttgctccctctctgtctggacaagtatgttctgtcaggacccaaccaagcaggttggggccagctagcaatacctcccggcccagctcagtcccaccagcctttagggagacctcttgggcacctggtgctatgccatgtccttgccctgcctcactatctaattagggagcagaaggcccacataggaatcattagtaactcattgctaatatttgcccagcactgaagaattgaccaggccctttcaggaatattatctcctttggacacaaaaactctaatttaagtacattagaaggccaggtgtggtggctcacacctgtaatcccagcactttggcaggccaaggtgagtggatcacttgagcccaggagttggagaccagcctgggcaacatgatgaaaccctgtttctacaaaaaatttttaaaaaattaaccaggtttggtgctgtgcgcctgttgtcccagctacttgggagtctaaggtgggaggatcacctgagcctggagaggttgaggctgaagtgagccatgtttgtgccactgcactccagcctgggcgacagagtgagaccccgtgtgtctctctctctctctgtcacacacacacacagacacacacacacacacagagacacacacacacaagcgaagttttggaatcctaatgatacgggttcagctctagcacttactggctatatgcccttgggcaagcgacttctctccttcaagcctcagtgttctcacctgtaaagcagggatagcaatagcccctggacctagggttgtttagtgcactgcttggcacaaagttagtgctccattggtagttgttatttttattattgccattattacccccacttacagatggggaagctggcggtcacatctcatatggtctcacagctcgtagggggcaaactctgctcttcccactgtggtgcataccatgcacaggctctcaaactcattgtttgttttgtgccatgagggccaagtagcagttccagaggagagaactccatccctcaggcccttacccagcccgtctgggcctgatcctgggctgggcaagcccctgggtgtagtgagggcacacacatgctgtgttcctgggcctgcggctgtcatctttgatacagacttacacgtgctgccccgtccccgcctaggaaaagcacggagggaaagcagagcaggccagagcctggccttctagatcagccttctgggacaggggcaggcttcatcttcagacagcgagctcctgagaaagaacaatggcttggggtggggaaactgaggggaggaagcagaggaccccctgcccacttgcccacccctccctcacacacagcagctctcctggtggtggccgccaccttcgccattaggccaaagctgagaaggaagctatgttgatctttgccccagcctgggcccctgggaatgctatgatgtgtcacaaagtagggctttcctcatgtcaccataccatggtctctggcagctcagtgaacagagcctgaaccccccgggtagcctgctctgctagtcttgcccagcaggcatctcttacccacacccccaccatggtggggaggttcctcatcctaagggatccgcagagctggacttgcctcagcagccccaccaggcctttgcctcttggccctgcctggaagtaaggaaagggccactgtgctgagtgttgggggacctgtttcctgtctttagctgtagggtttatgtgagtctccctacagtaaaagacagggttggatgatggtttcttaaggcagatcctccctggacagtctgtggctccttagctgctgtgagcccagaccagagcctccagtacaattgggagcctccagggggacatctctgagctgttggttcaggtacctaagattccaagatgggtgtactttgcctctcattcgcacatcagaggctgtggcatggaaccccattatagcataaggtgtgccacccccctgtggtgactggccacttaataaacattccagaactcactcctccagatggctgttgtcaccaccaaaagcagtcaccagagaggctggaagtctgttccaaacccttcctgggaatttccctcagagtctgaatgatattctctagaatgtcctcagagtggtcagtctgccttcttaggggtagatttgactttgcagagaaacctgaagtcatcaagagctaagactaattaataagataagtgaacaagtgggtaactgcccttttccatcagaaccgaggcatgctgtggaaggaaggacaggctgaccgtggcatcactgagcacacgcctgtgtgtatggtttaaatggctctgaagaagagtccaggaggagttttaaacatgtttcaagcccaggcaatacgattgaacaagtacacaattggacaatgctcgtttcgacgtctaagttctggtgtccttgttggggagttggtttcatgacccacactcagttccaggaacatcccagctttagcagatggcttgtactcagcttcagctcacaaaagaggtgtggtaaagtcccccacctcacaatgagaccaggggagggagagatcttgacatttccacctagaaaacagtttctcttgaaaataatccgttactgcaatgtaaaggttactttctgaaatattatagttcaattatggtatagagtaaatagacttctgagggctggtctgagcttgaacaaccttgaatcttgtatctatgaaaagttagcaaaaattaagagtgcaaatttgtaagcagtcaggacatagcctagccattaagttatagacttaatttatagacttcctatcatactacgttctattatatatccctgcctccctccttcagggagctcagaaacaccttcaagataatcagatcccactcctccttttactttcacttccattttatgacccagaaagtgaggaacagagaagttaaatagcttctcataagcctcacagctaacaagtggtagaaaagggagtagagtggtccagggaaacccctcagaaccaggttccaagccaaatgctttgccctgaaaaaaactcatccttggagttagggatgttggctcattctcttagaggacaatagttaatgcacaggttctatgtctggaaagggtccccagcggcaggcttgggttgaatagggcaccagaggtaaggtttaggcaaaggcaggaaggacaaattcccacaggcacgagcaaatgcaatataaatgcagtcatgttcagtgtataaaatgaaacgtgcagattgctggaggagctcagagaagggtgagtttccttttcctagaggcaggaggtgctcaggggagccgtcactgaggaagtggtgtgccaggccttggaggaaaagtaggccttcacaaggacacccagggtggggaggcagagctgggtgctcattccacacaaggcaaagactgcaaagcatgactgtggaggtgagtctggggaagaaggcattcggtagggctgctcagcaggaggaatgatggggggtgatgaggctgtgcaagtagcagggactgggtcagagtgagcctgtgtgtcaagttagagagccaggatcgtgtgccacaagcaccaaaggagcactaaatccttgaaggatttagttcacctctgagtggttagcagaacagaatacaaaagtgggatgggaggcaaggagtcccgttagaggactagtgaaatcatgattcccaggggaggctgggaatcaatttttcagaggcccatgtggaaaggagaaaatgaaaacactggttgtgtgtgtgtgtgtgtgtttgtccacccacctctctgtctctctctctcacacacacacacacacacacacacacacacacacagagacataagggtttatgtccatttaaagatgtctgttgtctgttcttgggaaggattttccttttttttcaaagataacatccttctaatgttttggtgtgtgaaaatgctcttttctctttggaacgacgatcatagcagagagtgattacttttcttcaacctatgctcttgtcaaaactgaaagtatttgaaaatattgtgttgggcccccaaagtctcattttgaagttttcttggttttggaaaccccaggtgagatgaggatgttctgtctggggcaggagcagtggtgatggaggggatggcatgagaggcctctgcggtggcatcagcagtctttgtccaggtggatgtgggagcagggagggaggagtcccagacgatggggagagttccagcacaggcagctggtgggtggctgctgagctggctatgcagaggcgccctggggatcctggtcttgggtgtggaaatttcaggtaagcctggaattgtctgaatgggtccacctcctgcttcttcctcctgactgccctggatcagctcttactccccactccacccccaattactccaggcccatgaccttgtctctgcccacagggacattggaggcaatgaaacagtgacactgcgccagtcgtttgtgcctgtgcgaccaggcccccgccagctcattgccagcttggacagcccacagctctcccaggtgcacggtgtcatccaggtggatgtggccccagcccctggggatgggggcttcttctcagacgctggaggtgacagtcacttaggagagaccatccctatggcatctcgaggtggagcttagccctgtgccaggagcaatgggactggagtcagatgagcaaggacattgccccaagataggggcacactacagagcagctccccaggagctcaggtggggagtccagggctcccggagagggagtcagtcttcacttgcactgggggaacagatgctaataaactgttttttaatgaagctgctgctctgtccatctttcagtccatgccacaccaagacggatggagccatggtttgtcccagggctgcacatggccttcctgtatcatccactgataggggctggtgtccctcaccagagagagggaaccacaagggaagttgaggctcagagagacagagtcgatactctttgtataactctcttctacctggaaattttcctgtgggtgagttttggaggattttggctttggtttgaatgaaactgttcccttacctcagggtttttcaagtgtagtctctaga

SEQ ID NO: 6119 - DNA, 2124 bp, Homo sapiens
attccgctcttgctttccggcaggtgatggcgccccccgcggcctagaggtccagcgcccgccgcgagcagcggacagtcctcctgttgtgtccgaccgagagtcctggtgactttgaacatgctggtgccgctagccaagctgtcctgcctggcatatcagtgctttcatgccttaaaaattaagaaaaattatctacctctatgtgctataagatggtcttcaacttctactgtgcctcgaattactacccattatactatttatccccgggataaggacaagagatgggaaggagtgaacatggaaaggtttgcagaagaagcagatgttgtaatagttggtgcaggccctgcagggctctctgcagctgttcgtctaaaacagttggctgtggcacatgaaaaggacatccgtgtgtgtctagtggagaaagctgcccagataggagctcatactctctcaggggcttgccttgatccaggtgcttttaaagaactcttcccagactggaaagagaagggggctccacttaacactcctgtaacagaagacagatttggaattttaacagagaaatacagaattcctgtgccaattcttccagggcttccaatgaataatcatggcaattacattgtacgcttgggacatttagtgagctggatgggcgaacaagcagaagcccttggtgttgaagtataccctggttatgcagctgctgaggtcctttttcatgatgatggtagtgtaaaaggaattgccactaacgatgtagggatacaaaaggatggtgcaccaaaggcaacatttgagagaggactggaactacatgctaaagtcacaatttttgcagaaggttgccatggacatctagccaagcaactatataagaagtttgatttgagagcaaattgtgaacctcaaacctacgggattggactgaaggagttatgggttattgatgaaaagaactggaaacctgggagagtagatcacactgttggttggcccttggacagacatacctatggaggatctttcctctatcatttgaatgaaggtgaacccctagtagctcttggtcttgtggttggtctagactatcagaatccatacctgagtccatttagagagttccaaaggtggaaacaccatcctagcattcggccaaccttggaaggtggaaaaaggattgcatacggagccagagctctcaatgaaggtggctttcagtctataccaaaactcacctttcctggtggtttactaattggttgtagtcctggttttatgaatgttcccaagatcaaaggtactcacacagcaatgaaaagtggaattttagcagcagaatctatttttaatcaactaactagtgaaaatctccaatcaaagacaataggactccatgtaactgaatatgaggacaatttgaagaactcatgggtatggaaagagctatattctgttagaaatataagaccgtcctgccacggagtactgggtgtatatggagggatgatttacactggaatcttttactggatattgagaggaatggagccgtggactctgaaacataaaggttctgactttgaacggctcaagccagccaaggattgcacacctattgagtatccaaaacccgatggacagatcagttttgacctcttgtcatctgtggctctgagtggtactaatcatgaacatgaccagccggcacacttaaccttaagggatgacagtatacctgtaaatagaaatctgtcgatatatgatgggcccgagcagcgattctgtcctgcaggagtttatgaatttgtacctgtggaacaaggtgatggatttcggttacagataaatgctcagaactgtgtacattgtaaaacatgtgatattaaagatccaagtcagaatattaactgggtggtacctgaaggtggaggaggacctgcttacaatggaatgtaaactgcagctagccagtttctttcaagtatggcaagctaacgttaaaatgtttagagattaacagatttcagaatgtctttctgcatattactgaacagaatagtcacaaaatgattatcaaataaaaattttatactataaaaaaaaaaa

SEQ ID NO: 6120 - DNA, 833 bp, Homo sapiens; identical to SEQ ID NO: 2424

SEQ ID NO: 6121 - DNA, 789 bp, Homo sapiens
gccaccgcccgcagctgaagcacatccgcagcccggcgcgactccgatcgccgcagttgccctctggcgccatgtccgagaacggagcgcccgggatgcaggaggagagcctgcagggctcctgggtagaactgcacttcagcaataatgggaacgggggcagcgttccagcctcggtttctatttataatggagacatggaaaaaatactgctggacgcacagcatgagtctggacggagtagctccaagagctctcactgtgacagcccacctcgctcgcagacaccacaagataccaacagggcttctgaaacagatacccatagcattggagagaaaaacagctcacagtctgaggaagatgatattgaaagaaggaaagaagttgaaagcatcttgaagaaaaactcagattggatatgggattggtcaagtcggccggaaaatattccccccaaggagttcctctttaaacacccgaagcgcacggccaccctcagcatgaggaacacgagcgtcatgaagaaagggggcatattctctgcagaatttctgaaagttttccttccatctctgctgctctctcatttgctggccatcggattggggatctatattggaaggcgtctgacaacctccaccagcaccttttgatgaagaactggagtctgacttggttcgttagtggattacttctgagcttgcaacatagctcactgaagagctgttagatcctgggccttcgtggctcgagagactagaatcgcagatacgaaaaccccgcagc

SEQ ID NO: 6122 - DNA, 2827 bp, Homo sapiens; identical to SEQ ID NO: 1437

SEQ ID NO: 6123 - DNA, 1885 bp, Homo sapiens
  misc_feature (1)..(1885): n=a,t,g or c
ttttttcccctnctcccccaaccnccaaccttcccccttacctcccccaccccctttatcaccaccccccttttaaataagagggtgaaggggaaccagagcgcacaagggaactgactcaggaggcagagaagatgggcatcctcagcgtagacttgctgatcacactgcaaattctgccagtttttttctccaactgcctcttcctggctctctatgactcggtcattctgctcaagcacgtggtgctgctgttgagccgctccaagtccactcgcggagagtggcggcgcatgctgacctcagagggactgcgctgcgtctggaagagcttcctcctcgatgcctacaaacaggtgaaattgggtgaggatgcccccaattccagtgtggtgcatgtctccagtacagaaggaggtgacaacagtggcaatggtacccaggagaagatagctgagggagccacatgccaccttcttgactttgccagccctgagcgcccactagtggtcaactttggctcagccacttgacctcctttcacgagccagctgccagccttccgcaaactggtggaagagttctcctcagtggctgacttcctgctggtctacattgatgaggctcatccatcagatggctgggcgataccgggggactcctctttgtcttttgaggtgaagaagcaccagaaccaggaagatcgatgtgcagcagcccagcagcttctggagcgtttctccttgccgccccagtgccgagttgtggctgaccgcatggacaataacgccaacatagcttacggggtagcctttgaacgtgtgtgcattgtgcagagacagaaaattgcttatctgggaggaaagggccccttctcctacaaccttcaagaagtccggcattggctggagaagaatttcagcaagagatgaaagaaaactagattagctggttaaaggtatgattataagagagcttattgttttaaaaagttatataaaggcaaggaaattaagaactgaatccatatttcaacagagccctattggcttactgaaagacaggagtttatctatcggaagaacatgaatctctaacagctccatacttctttcactactcaaatggcattgggctgagtaagtaaccatatcacctctcttcttagtaaaaagccctatgtgaaaagatcccaagatggagaggaagaaacgctaattcagcatgtgttcattctgcattgagaaggaactgatacatctgatgcatgctttgagaccagaagaaaagacttacctgaataattactacattagggaagctactgtctacgttaagataaagggtattgccttggctctatttggcatggatggagcccagttggaaaattcccaaatattacaacaagtccttgaacccaggccatgtggttagacgttggtgttaaggttagaccttatgttagagtcatttctgatgttccagcttctagccatgtagtgctctcagtcttcataccccagaaattattggtatatttgtagataccgagaatgatccctcagtctgagaggttagaatgatcatctgtaatctgagggttaatttctaggcaggtggagagagtggtaaaaaagaaatgaaattgacaagctaggaaagaggaggcagaaagatttggaaaattcacagagtttcacccttaagctgtagagagtgggtcacatttgttagccacggaaacatagaaacatacacaaggccagaaaaagaagaaggagctcaactaaaagtggcatagagaatacacatataaaaacaatatatttgtcatatgctcctagagaggagaaaggggtgattgaaaaaaaaaaaaaaaaaa

SEQ ID NO: 6124 - DNA, 577 bp, Homo sapiens; identical to SEQ ID NO: 4619

SEQ ID NO: 6125 - DNA, 2061 bp, Homo sapiens; identical to SEQ ID NO: 4620

SEQ ID NO: 6126 - DNA, 947 bp, Homo sapiens
gtggccggcgacaagatggcagcagcgtgtcggagcgtgaagggcctggtggcggtaataaccggaggagcctcgggcctgggcctggccacggcggagcgacttgtggggcagggagcctctgctgtgcttctggacctgcccaactcgggtggggaggcccaagccaagaagttaggaaacaactgcgttttcgccccagccgacgtgacctctgagaaggatgtgcaaacagctctggctctagcaaaaggaaagtttggccgtgtggatgtagctgtcaactgtgcaggcatcgcggtggctagcaagacgtacaacttaaagaagggccagacccataccttggaagacttccagcgagttcttgatgtgaatctcatgggcaccttcaatgtgatccgcctggtggctggtgagatgggccagaatgaaccagaccagggaggccaacgtggggtcatcatcaacactgccagtgtggctgccttcgagggtcaggttggacaagctgcatactctgcttccaaggggggaatagtgggcatgacactgcccattgctcgggatctggctcccataggtatccgggtgatgaccattgccccaggtctgtttggcaccccactgctgaccagcctcccagagaaagtgtgcaacttcttggccagccaagtgcccttccctagccgactgggtgaccctgctgagtatgctcacctcgtacaggccatcatcgagaacccattcctcaatggagaggtcatccggctggatggggccattcgtatgcagccttgaagggagaaggcagagaaaacacacgctcctctgcccttcctttccctggggtactactctccagcttgggaggaagcccagtagccattttgtaactgcctaccagtcgccctctgtgcctaataaagtctctttttctcacagag

SEQ ID NO: 6127 - DNA, 3574 bp, Homo sapiens; identical to SEQ ID NO: 283

SEQ ID NO: 6128 - DNA, 6694 bp, Homo sapiens; identical to SEQ ID NO: 2440

SEQ ID NO: 6129 - DNA, 4682 bp, Homo sapiens
aaggatccaagtgtcacggggtctgggcaatgcaggacgggaggggctgcgtgagtgagtacagaagggaaatgagtgagggggcatgggatctcagagaaaatcagggacctctgagcaaagtggaaaggacgaccgccgcagctcctcgggccgtagctcgaccccgccttcccttttccgcagaatcctcgccttggctgcagcagcgcgctgcccccactggccggcgtgccgtgatcgatcgcaggctgcgtcaggacctcccggcgtataaataggggtggcagaacggcgccgagccgcacacagccatccatcctcccccttccctctctcccctgtcctctctctccgggctcccaccgccgccggggagcaccggccgccaaccaatgagttccttcagctacgagccgtactactcgacctcctacaagcggcgctacgtggagacgccccgggtgcatatcagcgtgcgcagcggctacagcaccgcacgctcagcttactcaagctactcggcgccggtgtcttcctcgctgtccgtgcgccgcagctactcctccagctctggatcgttgatgcccagtctggagaacctcgacctgagccaggtagccgccatcagcaacgacctcaagtccatccgcacgcaggagaaggcgcagctccaggacctcaatgaccgcttcgccagcttcatcgagcgcgtgcacgagctggagcagcagaacaaggtcctggaagccgagctgctggtgctgcgccagaagcactccgagccatcccgcttccgggcgctgtacgagcaggagatccgcgacctgcgcctagcggcggaagatgccaccaccaacgagaagcaagcgctccgaggcgagcgcgaagaagggctggaggagaccctgcgcaacctgcaggcgcgctatgaagaggaggtgctgagccgcgaggacgccgagggccggctgatggaacgccgcaaaggcgccgacgaggcggcgctcgctcgcgccgagctcgagaagcgcatcgacagcttgatggacgaaatctcttttctgaagaaagtgcacgaagaggagatcgccgaactgcaggcgcagatccagtacgcgcagatctccgtggagatggacgtgaccaagcccgacctttccgccgcgctcaaggacatccgcgcgcagtacgagaagctggccgccaagaacatgcagaacgctgaggaatggttcaagagccgcttcacggtgctgaccgagagcgccgccaagaacaccgacgccgtgcgcgccgccaaggacgaggtgtcggagagccgtcgtctgctcaaggccaagaccctggaaatcgaagcatgccggggcatgaatgaagcgctggagaagcagctgcaggagctggaggacaagcagaacgccgacatcagcgctatgcaggtgcggcacggccagaaacacaggggggcggggaactcgagcaagggggggagttggtgcgcccagaaagcgaaaccaggggtggtgcggctgcccagctcttagggatagggcttggctccttggccactgtgtggaggggtggggctcttgaggggcgtgagtgcgggcgccactgtagtccgggagtgactgctccgcgtgctgcaccggcgttccgcattaaagctgcccgacccttgttgggtggggaggggaagacgtgggaattgggcgttgcctccgactgcagtgagatcagctctctactgacctgcgttgaccacgagttactttgcagcgactatcggatcgtctagttaataaatagtacgagtgaactaactctcaattaattctgaaggattactgtgaccagcatgctttatgactagttttaccaaccacctcccttcctttatttagtaggtagacaggaaaatagtcaacattgttttaggtagttaactagtgatgttcatagtaaaccatttccttttaccttttttttttctttttttctttatgtgtaaaatcttctacaacatttctgtttaaacatctccatcttctggggagtagaaaaaatacaattttaaaaagatctccattttaaaacatctccgtcttctggggagtagaaatttttttcttcttctggggagtagaaaaaataatttagatacataggaaatatttcatagaaaataatttttttcttttttttgtttacatctggtattttcttctcataaagaaaggcattagtttcctggcatgtaacccagctaaagaagagtaatcagtgaatgagagacacagtttttctatcaacttagtctgtttttctatcaacttagtctgtttgcatgcattttatgatgatcattaaacagtattaagtaaagaaacagaagaacagaattttcgtccatcttttttttcatctcaggcttcatgaacttgggtattttaggcatgaaggtttttcaaaagatacaggaagttattctaggagagattttatcaaagtgtgcaccttgattttaatcgaaactaggcctttgcaactacactacagtaaaataatagaagggatttatgctcggattttttttttgttttatttttgtcttcaaacaggacacgatcaacaaattagaaaatgaattgaggaccacaaagagtgaaatggcacgatacctaaaagaataccaagacctcctcaacgtgaagatggctttggatattgagattgctgcttacaggtgaaaatagaggggcaaagacagcagccattaaaccttaggaagaaaatcagatcccatttaaagttatgttggatcagaaaccttcaataatagtccttttgaaataatgaagtgttagtttttggcttcttccaagaagagggtatttagatatataagaatttaaccctgtaattagagtcctgtttttatcttgtcattacactttaaatctaataggagtgatttatttatattttttctggtctccatcaaaagatccccaggcattaagtattgataaatcccagccctgctcctgcttgcctttgtgtttagggtactcagagcaagttgtgaaacacaggtgttttttaacctcaccttgcacctgcatccccaggaaactcttggaaggcgaggagacccgactcagtttcaccagcgtgggaagcataaccagtggctactcccagagctcccaggtctttggccgatctgcctacggcggtttacagaccagctcctatctgatgtccacccgctccttcccgtcctactacaccagccatgtccaagaggagcagaccgaagtggaggaaaccattgaggcgtctaaggctgaggaagccaaggatgagcccccctctgaaggagaagccgaggaggaggagaaggacaaggaagaggccgaggaagaggaggcagctgaagaggaagaaggtatgataagaaaaaacccctgcaacttcaagtgtaaactgggtgtggagatttgttaggaggtggataagacaaatgaagccttgctcatttattcatatatgacattagaatcataaataaattttctgtttgtttagcaaaactttcctaaggcatctactctgaatgaggtgattggtcaaaattttcattttttaatataatcatttaacacagcaggttggtgtcctaaagaacaaaaatagataccagacacataatgaaagaaatattgaggttaagtcttggagaggagcagagcttcccatacctagaagtgatctcattcgatttaaatatgtgttcagtggcaaattattcatggcaagctttgtctgttacatgtgcttttggagagagtggagctgggaggttttggtagcattctgacagttgtgtttgcaaataaaacctttgcagacatgttttgactggacttaccctggatttgcattttgtacattttctttttatgttaaagctgccaaggaagagtctgaagaagcaaaagaagaagaagaaggaggtgaaggtgaagaaggagaggaaaccaaagaagctgaagaggaggagaagaaagttgaaggtgctggggaggaacaagcagctaagaagaaagattgaacccccatttccttaattatttcaggaataattctcccgaaatcaggtcaaccccatcaccaaccaaccaaccagttgagttccagattctatgtgaattaaaaagtcaatatatgtataattctgagatgacttaggttggacattcaatgttgtgctatgaatttcctctttatgcagagtatctgtttgcttgcagagtggctttcggcttgctgccagcctgtgcatggtccacgcttatgagttcaggatctacggcaatgtgaatcattcagatgtttacaataaaaaacaccacatgagtaaatgaattcactaatgttaatgttaaacttcatggaaaagtagtcctttgaaccttcggtggttagcaattaaagaccctgagttatgtgcaataaatagtaaataaagttataccgaatgatgtattttttgccgtggttgttacctaattaaaataccttaaagatggcaccaatataaagtgtgtgccagtgaactattgacctccaattttttaaaaagccgaaattttaacaattaccaatactttttt

SEQ ID NO: 6130 - DNA, 1198 bp, Homo sapiens
tactaagagtctccagcatcctccacctgtctaccaccgagcatgggcctatatttgaagccttagatctctccagcacagtaagcaccaggagtccatgaagaagatggctcctgccatggaatcccctactctactgtgtgtagccttactgttcttcgctccagatggcgtgttagcagtccctcagaaacctaaggtctccttgaaccctccatggaatagaatatttaaaggagagaatgtgactcttacatgtaatgggaacaatttctttgaagtcagttccaccaaatggttccacaatggcagcctttcagaagagacaaattcaagtttgaatattgtgaatgccaaatttgaagacagtggagaatacaaatgtcagcaccaacaagttaatgagagtgaacctgtgtacctggaagtcttcagtgactggctgctccttcaggcctctgctgaggtggtgatggagggccagcccctcttcctcaggtgccatggttggaggaactgggatgtgtacaaggtgatctattataaggatggtgaagctctcaagtactggtatgagaaccacaacatctccattacaaatgccacagttgaagacagtggaacctactactgtacgggcaaagtgtggcagctggactatgagtctgagcccctcaacattactgtaataaaagctccgcgtgagaagtactggctacaattttttatcccattgttggtggtgattctgtttgctgtggacacaggattatttatctcaactcagcagcaggtcacatttctcttgaagattaagagaaccaggaaaggcttcagacttctgaacccacatcctaagccaaaccccaaaaacaactgatataattactcaagaaatatttgcaacattagtttttttccagcatcagcaattgctactcaattgtcaaacacagcttgcaatatacatagaaacgtctgtgctcaaggatttatagaaatgcttcattaaactgagtgaaactggttaagtggcatgtaatagtaagtgctcaattaacattggttgaataaatgagagaatgaatagattcatttattagcatttgtaaaagagatgttcaatttcaataaaataaatataaaaccatgtaacagaatgcttctgagtaaaaaaaaaaaaaaaaaaaaaaaaaaa

SEQ ID NO: 6131 - DNA, 1940 bp, Homo sapiens
aggcctgctcactcctcagctgcaggagccagacgtgtggagtcccagcagaggccaacctgtgtctcttcatctccgtgagaaaggtgcccccgaagtgaaagagatggcctggtggaaagcctggattgaacaggagggtgtcacagtgaagagcagctcccacttcaacccagaccctgatgcagagaccctctacaaagccatgaaggggatcgggaccaacgagcaggctatcatcgatgtgctcaccaagagaagcaacacgcagcggcagcagatcgccaagtccttcaaggctcagttcggcaaggacctcactgagaccttgaagtctgagctcagtggcaagtttgagaggctcattgtggcccttatgtatccgccatacagatacgaagccaaggagctgcatgacgccatgaagggcttaggaaccaaggagggtgtcatcattgagatcctggcctctcggaccaagaaccagctgcgggagataatgaaggcgtatgaggaagactatgggtccagcctggaggaggacatccaagcagacacaagtggctacctggagaggatcctggtgtgcctcctgcagggcagcagggatgatgtgagcagctttgtggacccggcactggccctccaagacgcacaggatctgtatgcggcaggcgagaagattcgtgggactgatgagatgaaattcatcaccatcctgtgcacgcgcagtgccactcacctgctgagagtgtttgaagagtatgagaaaattgccaacaagagcattgaggacagcatcaagagtgagacccatggctcactggaggaggccatgctcactgtggtgaaatgcacccaaaacctccacagctactttgcagagagactctactatgccatgaagggagcagggacgcgtgatgggaccctgataagaaacatcgtttcaaggagcgagattgacttaaatcttatcaaatgtcacttcaagaagatgtacggcaagaccctcagcagcatgatcatggaagacaccagcggcgactacaagaacgccctgctgagcctggtgggcagcgacccctgaggcacagaagaacaagagcaaagaccatgaagccagagtctccaggactcctcactcaacctcggccatggacgcaggttgggtgtgaggggggtcccagcctttcggtcttctatttccctatttccagtgctttccagccgggtttctgacccagaggtggaaccggcctggactcctcttcccaacttcctccaggtcatttcccagtgtgagcacaatgccaaccttagtgtttctccagccagacagatgcctcagcatgaagggcttggggacttgtggatcattccttcctccctgcaggagcttcccaagctggtcacagagtctcctgggcacaggttatacagaccccagccccattcccatctactgaaacagggtctccacaagaggggccagggaatatgggtttttaacaagcgtcttacaaaacacttctctatcatgcagccggagagctggctgggagcccttttgttttagaacacacatccttcagcagctgagaaatgaacacgaatccatcccaaccgagatgccattaacattcatctaaaaatgttaggctctaaatggacgaaaaattctctcgccatcttaataacaaaataaactacaaattcctgacccaaggacactgtgttataagaggcgtgggctcccctggtggctgaccaggtcagctgccctggccttgcacccctctgcatgcagcacagaagggtgtgaccatgccctcagcaccactcttgtccccactgaacggcaactgagactgggtacctggagattctgaagtgcctttgctgtggttttcaaaataataaagatttgtattcaactc

SEQ ID NO: 6132 - DNA, 1426 bp, Homo sapiens; identical to SEQ ID NO: 300

SEQ ID NO: 6133 - DNA, 455 bp, Homo sapiens
cccagctcgctctctgcagccatgattgccagacagcagtgtgtccgaggcgggccccggggcttcagctgtggctcggccattgtaggcggtggcaagagaggtgccttcagctcagtctccatgtctggaggtgctggccgatgctcttctgggggatttggcagcagaagcctctacaacctcagggggaacaaaagcatctccatgagtgtggctgggtcacgacaaggtgcctgctttgggggtgctggaggctttggcactggtggctttggtgccggcggcttcggagctggtttcggcactggtggctttggtggtggatttgggggctccttcagtggtaagggtggccctggcttccccgtcctgcccgctgggggaattcaggaggtcaccatcaaccagagcttgctcacccccctccacgtggagattgaccctgagatcca

SEQ ID NO: 6134 - DNA, 2055 bp, Homo sapiens
ctgagcatcagtcagaaaaagtctatgtttgcagaaatacagatccaagacaaagacaggatgggcactgctggaaaagttattaaatgcaaagcagctgtgctttgggagcagaagcaacccttctccattgaggaaatagaagttgccccaccaaagactaaagaagttcgcattaagattttggccacaggaatctgtcgcacagatgaccatgtgataaaaggaacaatggtgtccaagtttccagtgattgtgggacatgaggcaactgggattgtagagagcattggagaaggagtgactacagtgaaaccaggtgacaaagtcatccctctctttctgccacaatgtagagaatgcaatgcttgtcgcaacccagatggcaacctttgcattaggagcgatattactggtcgtggagtactggctgatggcaccaccagatttacatgcaagggcaaaccagtccaccacttcatgaacaccagtacatttaccgagtacacagtggtggatgaatcttctgttgctaagattgatgatgcagctcctcctgagaaagtctgtttaattggctgtgggttttccactggatatggcgctgctgttaaaactggcaaggtcaaacctggttccacttgcgtcgtctttggcctgggaggagttggcctgtcagtcatcatgggctgtaagtcagctggtgcatctaggatcattgggattgacctcaacaaagacaaatttgagaaggccatggctgtaggtgccactgagtgtatcagtcccaaggactctaccaaacccatcagtgaggtgctgtcagaaatgacaggcaacaacgtgggatacacctttgaagttattgggcatcttgaaaccatgattgatgccctggcatcctgccacatgaactatgggaccagcgtggttgtaggagttcctccatcagccaagatgctcacctatgacccgatgttgctcttcactggacgcacatggaagggatgtgtctttggaggtttgaaaagcagagatgatgtcccaaaactagtgactgagttcctggcaaagaaatttgacctggaccagttgataactcatgttttaccatttaaaaaaatcagtgaaggatttgagctgctcaattcaggacaaagcattcgaacggtcctgacgttttgagatccaaagtggcaggaggtctgtgttgtcatggtgaactggagtttctcttgtgagagttccctcatctgaaatcatgtatctgtctcacaaatacaagcataagtagaagatttgttgaagacatagaacccttataaagaattattaacctttataaacatttaaagtcttgtgagcacctgggaattagtataataacaatgttaatatttttgatttacattttgtaaggctataattgtatcttttaagaaaacatacacttggatttctatgttgaaatggagatttttaagagttttaaccagctgctgcagatatataactcaaaacagatatagcgtataaagatatagtaaatgcatctcctagagtaatattcacttaacacattgaaactattattttttagatttgaatataaatgtattttttaaacacttgttatgagttaacttggattacattttgaaatcagttcattccatgatgcatattactggattagattaagaaagacagaaaagattaagggacgggcacatttttcaacgattaagaatcatcattacataacttggtgaaactgaaaaagtatatcatatgggtacacaaggctatttgccagcatatattaatattttagaaaatattccttttgtaatactgaatataaacatagagctagagtcatattatcatacttatcataatgttcaatttgatacagtagaattgcaagtccctaagtccctattcactgtgcttagtagtgactccatttaataaaaagtgtttttagtttttaacaactacactgatgtatctatatatatctataacatgttaaaaattcttaagaaaatt

SEQ ID NO: 6135 - DNA, 1306 bp, Homo sapiens; identical to SEQ ID NO: 3759

SEQ ID NO: 6136 - DNA, 1023 bp, Homo sapiens
ttatgcctctatcattcctccctatctacactaacatcccacgctctgaacgcgcgcccattaatacccttctttcctccactctccctgggactcttgatcaaagcgcggccctttccccagccttagcgaggcgccctgcagcctggtacgcgcgtggcgtggcggtgggcgcgcagtgcgttctcggtgtggagggcagctgttccgcctgcgatgatttatactcacaggacaaggatgcggtttgtcaaacagtactgctacggaggagcagcagagaaagggagagggtttgagagggagcaaaagaaaatgcagcgggcgggcactttgcactggaacttacaacacccgagcaaggacgcgactctcccgacgcggggaggctattctgcccatttggggacacttccccgccgctgccaggacccgcttctctgaaaggctctccttgcagctgcttagacgctggatttttttcgggtagtggaaaaccagcctcccgcgacgatgcccctcaacgttagcttcaccaacaggaactatgacctcgactacgactcggtgcagccgtatttctactgcgacgaggaggagaacttctaccagcagcagcagcagagcgagctgcagcccccggcgcccagcgaggatatctggaagaaattcgagctgctgcccaccccgcccctgtcccctagccgccgctccgggctctgctcgccctcctacgttgcggtcacacccttctcccttcggggagacaacgacggcggtggcgggagcttctccacggccgaccagctggagatggtgaccgagctgctgggaggagacatggtgaaccagagtttcatctgcgacccggacgacgagaccttcatcaaaaacatcatcatccaggactgtatgtggagcggcttctcggccgccgccaagctcgtctcagagaagctggcctcctaccaggctgcgcgcaaagacagcggcagcccgaaccccgcccgcggccacagcgtc

SEQ ID NO: 6137 - DNA, 2084 bp, Homo sapiens
ggaactgcaaccatggtgcccagcttcctctccctgagcttctcctccttgggcctgtgggcttctgggctgatcttggtcttaggctttctcaagctcatccacctgctgctgcggaggcgaacgttggctaaggctatggacaaattcccagggcctcccacccactggctttttggacatgccctcgagatccaggagacggggagcctggacaaagtggtgtcctgggcccaccagttcccgtatgcccacccactctggttcggacagttcattggcttcctgaacatctatgagcctgactatgccaaagctgtgtacagccgtggggaccctaaggcccctgatgtgtatgacttcttcctccagtggattgggagaggcctgctggttcttgaggggcccaagtggttgcagcaccgcaagctgctcacacctggctttcattatgatgtgctgaagccctatgtggccgtgttcactgagtctacacgtatcatgctggacaagtgggaagagaaagctcgggagggtaagtcctttgacatcttctgcgatgtgggtcacatggcgctgaacacactcatgaagtgcacctttggaagaggagacaccggcctgggccacagggacagcagctactaccttgcagtcagcgatctcactctgttgatgcagcagcgccttgtgtccttccagtaccataatgacttcatctactggctcaccccacatggccgccgcttcctgcgggcctgccaggtggcccatgaccatacagaccaggtcatcagggagcggaaggcagccctgcaggatgagaaggtgcggaagaagatccagaaccggaggcacctggacttcctggacattctcctgggtgcccgggatgaagatgacatcaaactgtcagatgcagacctccgggctgaagtggacacattcatgtttgaaggccatgacaccaccaccagtggtatctcctggtttctctactgcatggccctgtaccctgagcaccagcatcgttgtagagaggaggtccgcgagatcctaggggaccaggacttcttccagtgggatgatctgggcaaaatgacttatctgaccatgtgcatcaaggagagcttccgcctctacccacctgtgccccaggtgtaccgccagctcagcaagcctgtcacctttgtggatggccggtctctacctgcaggaagcctgatctctatgcatatctatgccctccataggaacagtgctgtatggcccgaccctgaggtctttgactctctgcgcttttccactgagaatgcatccaaacgccatccctttgcctttatgcccttctctgctgggcccaggaactgcattgggcagcagtttgccatgagtgagatgaaggtggtcacagccatgtgcttgctccgctttgagttctctctggacccctcacggctgcccatcaagatgccccagcttgtcctgcgctccaagaatggctttcacctccacctgaagccactgggccctgggtctgggaagtagctctgatgagaatggggtcccagatggctcaggctgtgacctccctgggcaccaccctccccaggctgggtgtggaggagttggggccccctgccttcaggaggcttgtagtttagaagggaagtaggcattaccatagacgactcctagaggacagtgctatgtaaaaatgtgtgtctataaatgtttatcatgcatgtattctagagctcattcatttattcaacaaacatttggtgagcacctatttcggttcgagaaacttcatttatctcctataattggcaaacttaaaaatgcagcagaaacttacattccaaccttagagactcatagtgagcacaaggaaagttttgccctgagattcatggttatggctgggtaccaccaaatagaagaatggcttaggggagtgccccttcactgagatgtgtttctttgttgaactttgtgtgtgtgtgtttagaatataacagacataagaaaaaattacctaaatgaagactgtacaaaataataaataattctgaagcaga

SEQ ID NO: 6138 - DNA, 1199 bp, Homo sapiens
aattcatcagctactatgtcatacgtgtactctgtaaatctgaccaatctgttaagttctatatcacccacaatatagtaaagtgcactgatttttaatattagacttaaagttgttttccttctttctaatacttgctgtaattttcttttgtttgttttgttttgttttgctttgcagctggaaagtgaaataacctatgacaaactcaacaagtggaccagcaaagacaaaatggctgaagatgaagttgaggtatacataccccagttcaaattagaagagcattatgaactcagatccattctgagaagcatgggcatggaggacgccttcaacaagggacgggccaatttctcagggatgtcggagaggaatgacctgtttctttctgaagtgttccaccaagccatggtggatgtgaatgaggagggcactgaagcagccgctggcacaggaggtgttatgacagggagaactggacatggaggcccacagtttgtggcagatcatccttttctttttcttattatgcataagataaccaactgcattttatttttcggcagattttcctcaccctaaaactaagcgtgctgcttctgcaaaagatttttgtagatgagctgtgtgcctcagaattgctatttcaaattgccaaaaatttagagatgttttctacatatttctgctcttctgaacaacttctgctacccactaaataaaaacacagaaataattagacaattgtctattataacatgacaaccctattaatcatttggtcttctaaaatgggatcatgcccatttagattttccttactatcagtttatttttataacattaacttttactttgttatttattattttatataatggtgagtttttaaattattgctcactgcctatttaatgtagctaataaagttatagaagcagatgatctgttaatttcctatctaataaatgcctttaattgttctcataatgaagaataagtaggtatccctccatgcccttctgtaataaatatctggaaaaaacattaaacaataggcaaatatatgttatgtgcatttctagaaatacataacacatatatatgtctgtatcttatattcaattgcaagtatataataaataaacctgcttccaaacaacaatacacttgttgtcatttcattaggtctgcag

SEQ ID NO: 6139 - DNA, 922 bp, Homo sapiens; identical to SEQ ID NO: 4867
  misc_feature (1)..(922): n=a,t,g or c

SEQ ID NO: 6140 - DNA, 2746 bp, Homo sapiens
gagctcctggggcaatgtggaccagagaatgatagtgggacttcctggctgagccttcaaggtctcctttgtctctcctccttgtcccctccctcacaggcctgcagcccactgatcatcttccagcccttggccctgccatggccactccggcctagacagctgcttctcagcaggaggtctgtccttgaccaggctgaaaggtgacctcggggtcctgtccatcaccaccttgtatgtccatcagcatttatcaataatccctagtcaccttgtttgcattcctcgatcagtttacctgcaaactagctgcttgctagttaacctcacgaggactgggggtggcttgcggtcccactgtgttcccagcttccagagtgacactgcacctagtaggcactcaaatatctgtgaaagggtggatgagtgaatgggttggaggaaacccctccctattcatgtccattctgaagataagaaaactcgctgcttctacctgaagggaaaaccttcctcctccaaaaaccctcctgttctatatgaggcttagaaaccaaaggcaaggacgtttctttcatctgcctttcatcctgcaaaaagccctccactcaaggcaagaaagggcactgaagtttattgagtgggagacagcggcaggtgggagaccggggagggaggagagaaagggaaattcaggaggaaggagtccagcgtggattgctccaaagctcacccaccacgccctgactgcaggtgtgattcggggcccccgtggctctgctgggtccaggtgcaagcaggcacagaggtgctggcgtcagctcgattcgcaggccctggactcctgtctaaacaggacaggcccgggcaaccgcagggcaggggcgtctgccaatgatgggggaggactctgctgcttcttaagctccagcgtctcaagccagggcgagacagcccgccggccgcccggatctccacctgccaccccagagctgggacagcagccgggctgcggcactgggagggagaccccacagtggcctcttctgccacccacgcccccacccctggcatggccgaccagctgactgaggagcaggtcacagaattcaaggaggccttctccctgtttgacaaggatggggacggctgcatcaccacccgcgagctgggcacggtcatgcggtccctgggccagaaccccacggaggccgagctgcgggacatgatgagtgagatcgaccgggacggcaacggcaccgtggacttccccgagttcctgggcatgatggccaggaagatgaaggacacggacaacgaggaggagatccgcgaggccttccgcgtgttcgacaaggacggcaacggcttcgtcagcgccgccgagctgcgacacgtcatgacccggctgggggagaagctgagtgacgaggaggtggacgagatgatccgggccgcggacacggacggagacggacaggtgaactacgaggagtttgtccgtgtgctggtgtccaagtgaggccggcgcccaccatgctcctgggcccccacgcggcccacagggcaagaacccggggcctcccgcctcctcccccatccccctgcctcccctgggcactgtggcttcctcctgcgcctggttgattcagcccacctctctgcatcccgcttcccgcgtctcttctctgcactcctgccgaccttcccacctgctcatctgaatgacacggaacgctcccactgcaggcaaaccgtgacgccctccccactcgggagaagcagagctgaccttaggaccgagcaccagggcaggttgcgctgactctgcggccctccaggacggacaccgggtgacccttaggcacaggcaagatccctaacaggcaccaatgccaggcagggggctgcagccctcagcccccgccaagattcccgcaggctcctggactggaagctccctccgcggtcggattctggagggtgggaggcatcttggcctgcagtaagcggtgctgacggggactctggccacagaggtcaggcctcctgaaaacagcactgccttccgcgctgccccagcttgccccattccttgtccgccaacccaccgtgattcatcttctgaagctgggagtgaaactgggtcagctgtaacctgttcctattcatctggaaggagggaggcttggatgagcaggggatgagagctgcagggaaataaatgagatattcgtccttatttcatttcctttttttttttggtttccatggaaatgatccttgttaaattcagggttgaaacgaggcaggaatctccatttttgtgctttttgaaaatgcaatgaattcctatacgggggagcgggaaaggtgcctcagagagagacaagtctggatgagggaaatattgaatattctcaatcaaatggatacgctggcagcaaagagtggttaaagtccatcaggacttgaaagacctgagtccattacgttgagaagggacctgctgattgctttgattccccctggcaagtgctccctggttgtgaatgccaggcactagagatggtgaggggttggggggcagttgggcacacacagtgtaagagcaattcagagccgttagtcctgcactagccctcaagctgctggcaacacctagagaaggtcgaagggccctgccagagatcccttcaattctaaagggaggtatgttttgcgggatgggcactagacggagctc

SEQ ID NO: 6141 - DNA, 756 bp, Homo sapiens
atgttggtattgctggctggtatctttgtggtccacatcgctactgttattatgctatttgttagcaccattgccaatgtctggttggtttccaatacggtagatgcatcagtaggtctttggaaaaactgtaccaacattagctgcagtgacagcctgtcatatgccagtgaagatgccctcaagacagtgcaggccttcatgattctctctatcatcttctgtgtcattgccctcctggtcttcgtgttccagctcttcaccatggagaagggaaaccggttcttcctctcaggggccaccacactggtgtgctggctgtgcattcttgtgggggtgtccatctacactagtcattatgcgaatcgtgatggaacgcagtatcaccacggctattcctacatcctgggctggatctgcttctgcttcagcttcatcatcggcgttctctatctggtcctgagaaagaaataaggccggacgagttcatggggatctggggggtggggaggaggaagccgttgaatctgggagggaagtggaggttgctgtacaggaaaaaccgagataggggaggggggagggggaagcaaaggggggaggtcaaatcccaaaccattactgaggggattctctactgccaagcccctgccctggggagaaagtagttggctagtactttgatgctcccttgatggggtccagagagcctccctgcagccaccagacttggcctccagctgttcttagtgacac

SEQ ID NO: 6142 - DNA, 942 bp, Homo sapiens
cgcgagtgaaggaagacgaatgcgtgacccgaccggctgtggtgttccagtccccactgaccagtaggagcagcagggcgtcggcttgtgaggtggcttttcctcggggcaacccaggaaggccccaagaggacaatggattctggaactcgcccagttggtagctgctgtagcagccccgctgggctctcacgggagtacaaactagtgatgctgggtgctggtggtgtagggaagagtgccatgaccatgcagttcatcagccaccgattcccagaagatcatgatcccaccattgaagatgcttataagatcaggatccgtattgatgatgagcctgccaatctggacattttggatacagctggacaggcagagtttacagccatgcgggaccagtatatgagggcaggagaagggtttatcatctgttactctatcacggatcgtcgaagtttccatgaagttcgtgagtttaaacagcttatttatcgagtccgacgtactgacgatacacctgtggttcttgtgggaaacaagtcagacctcaaacagctaagacaggtcaccaaggaagaaggattggccttggcccgagaattcagctgtcccttttttgagacatctgctgcataccgctactatattgatgatgttttccatgcccttgtacgggagatacgtaggaaagaaaaggaggcagtactggccatggagaaaaaatctaagcccaaaaacagtgtatggaagaggctaaaatcaccattccggaagaagaaagattcagtaacttgaagagaagatgtgagtgtttatctgtgactgcgtgctgttcaagcagtccagtaactgcagtactgagtatgtgcttgctcttcacttaactgataagagggacatgctactaggagtttaatgatgtggattaagtatgctctagta

SEQ ID NO: 6143 - DNA, 2128 bp, Homo sapiens
ctggaaaccactgcaatgacattattcccagtgctgttgttcctggttgctgggctgcttccatcttttccagcaaatgaagataaggatcccgcttttactgctttgttaaccacccaaacacaagtgcaaagggagattgtgaataagcacaatgaactgaggagagcagtatctccccctgccagaaacatgctgaagatggaatggaacaaagaggctgcagcaaatgcccaaaagtgggcaaaccagtgcaattacagacacagtaacccaaaggatcgaatgacaagtctaaaatgtggtgagaatctctacatgtcaagtgcctccagctcatggtcacaagcaatccaaagctggtttgatgagtacaatgattttgactttggtgtagggccaaagactcccaacgcagtggttggacattatacacaggttgtttggtactcttcatacctcgttggatgtggaaatgcctactgtcccaatcaaaaagttctaaaatactactatgtttgccaatattgtcctgctggtaattgggctaatagactatatgtcccttatgaacaaggagcaccttgtgccagttgcccagataactgtgacgatggactatgcaccaatggttgcaagtacgaagatctctatagtaactgtaaaagtttgaagctcacattaacctgtaaacatcagttggtcagggacagttgcaaggcctcctgcaattgttcaaacagcatttattaaatacgcattacacaccgagtagggctatgtagagaggagtcagattatctacttagatttggcatctacttagatttaacatatactagctgagaaattgtaggcatgtttgatacacatttgatttcaaatgtttttcttctggatctgctttttattttacaaaaatatttttcatacaaatggttaaaaagaaacaaaatctataacaacaactttggatttttatatataaactttgtgatttaaatttactgaatttaattagggtgaaaattttgaaagttgtattctcatatgactaagttcactaaaaccctggattgaaagtgaaaattatgttcctagaacaaaatgtacaaaaagaacaatataattttcacatgaacccttggctgtagttgcctttcctagctccactctaaggctaagcatcttcaaagacgttttcccatatgctgtcttaattcttttcactcattcacccttcttcccaatcatctggctggcatcctcacaattgagttgaagctgttcctcctaaaacaatcctgacttttattttgccaaaatcaatacaatcctttgaattttttatctgcataaattttacagtagaatatgatcaaaccttcatttttaaacctctcttctctttgacaaaacttccttaaaaaagaatacaagataatataggtaaataccctccactcaaggaggtagaactcagtcctctcccttgtgagtcttcactaaaatcagtgactcacttccaaagagtggagtatggaaagggaaacatagtaactttacaggggagaaaaatgacaaatgacgtcttcaccaagtgatcaaaattaacgtcaccagtgataagtcattcagatttgttctagataatctttctaaaaattcataatcccaatctaattatgagctaaaacatccagcaaactcaagttgaaggacattctacaaaatatccctggggtattttagagtattcctcaaaactgtaaaaatcatggaaaataagggaatcctgagaaacaatcacagaccacatgagactaaggagacatgtgagccaaatgcaatgtgcttcttggatcagatcctggaacagaaaaagatcagtaatgaaaaaactgatgaagtctgaatagaatctggagtatttttaacagtagtgttgatttcttaatcttgacaaatatagcagggtaatgtaagatgataacgttagagaaactgaaactgggtgagggctatctaggaattctctgtactatcttaccaaattttcggtaagtctaagaaagcaatgcaaaataaaaagtgtcttgaaaaaaaaaaaaaaaaaaaaaaaaaaaaa

SEQ ID NO: 6144 - DNA, 683 bp, Homo sapiens; identical to SEQ ID NO: 3771

SEQ ID NO: 6145 - DNA, 678 bp, Homo sapiens
agaggttctcagcctcatgactcctaaactcctggtacttgagcaccgatctgcttcggagaacctgattctgagactccagcaggatgtcttatcaacagtagcaatgtaagcagccctgccagccacctcctgtgtgccgcctgccaaagcgtccagagccatgtccacccctgaagtgccctgagccctgcccaccaccaaagtgtccacagccctgcccacctcagcagtgccagcagaaatatcctctggtgacaccttccccaccctgccagccaaagtgtccacccaagagcaagtaacagcttcggaattcatcaggaccacgaaaggatagggataattggctcacctcgttccacagctccacctgcatcttctcatcaaagccatccagggatacacagggagcttctttccccttagcctgtgatctgcccatgatgatccccgacagcaaaatgtttcctttctgaggctgccatgctgccactgtccaggtggagactgagcaaaggaagtcctcagctgtaccggcctttcagagcttctctttgggtgccatcaaagaattattttgatgtcttctgtctctgtctgtcacctggcatgagcttctactatctgtgcaattgtcacttttctttcactccctgaataaagtagctatgccta

SEQ ID NO: 6146 - DNA, 453 bp, Homo sapiens; identical to SEQ ID NO: 525
  misc_feature (1)..(453): n=a,t,g or c

SEQ ID NO: 6147 - DNA, 287 bp, Homo sapiens; identical to SEQ ID NO: 1380

SEQ ID NO: 6148 - DNA, 411 bp, Homo sapiens; identical to SEQ ID NO: 5014
  misc_feature (1)..(411): n=a,t,g or c

SEQ ID NO: 6149 - DNA, 329 bp, Homo sapiens; identical to SEQ ID NO: 2247
  misc_feature (1)..(329): n=a,t,g or c

SEQ ID NO: 6150 - DNA, 492 bp, Homo sapiens; identical to SEQ ID NO: 4281
  misc_feature (1)..(492): n=a,t,g or c

SEQ ID NO: 6151 - DNA, 268 bp, Homo sapiens; identical to SEQ ID NO: 5384
  misc_feature (1)..(268): n=a,t,g or c

SEQ ID NO: 6152 - DNA, 551 bp, Homo sapiens
  misc_feature (1)..(551): n=a,t,g or c
ntacattatggaaatttatncctcctgaatgtataaggcaggagactaattcaatatacattcactatgcagaattctacaagttctgggctatgtgtaaatgtgccccccttccctccattatcaggatgtttaaatgtgtttcctttttttcatttaaaactttgcttagatgttttacattgccatcacctcttcctgagaaaaaggtgtgtcccccaccccaacccctaggagccangcagactatcttnctgaggggccacaagcacactcccacngtggagaacaagggcagtggatgaagggaacggggatttttcaaactaatgttttccctcaaacaggcctcccggcgccngttagacttgaagcaatgacatctattaaaatggggaccccagctgggggttaagaatgttngtttaagaatgatgacgatatcttgaaaagaaattcttggctggggatggngtagggggaaagggaaaaaaattaattattttgactttcccattggcaatgcttgctacgtttaatctgattgcatt

SEQ ID NO: 6153 - DNA, 115 bp, Homo sapiens; identical to SEQ ID NO: 4802

SEQ ID NO: 6154 - DNA, 328 bp, Homo sapiens; identical to SEQ ID NO: 541
  misc_feature (1)..(328): n=a,t,g or c

SEQ ID NO: 6155 - DNA, 374 bp, Homo sapiens; identical to SEQ ID NO: 849

SEQ ID NO: 6156 - DNA, 261 bp, Homo sapiens; identical to SEQ ID NO: 860

SEQ ID NO: 6157 - DNA, 257 bp, Homo sapiens
  misc_feature (1)..(257): n=a,t,g or c
ttccatccacgtgtgtttattttagatgctttctgtgtgggagctggggagacaggtcagtaggacccacgcctgtgcctgaggggccccagtctgggcaagtggtcccagccnttcacaaggctgcacacactccctgtgcactcgcagaggcttctctgaggaggaggctgtgaaggaggccacgaatgcaaggacatttccaggcaggcatcctaggtgcagggacctgccgcccaaagccagagaggtgaggt

SEQ ID NO: 6158 - DNA, 549 bp, Homo sapiens
  misc_feature (1)..(549): n=a,t,g or c
gttctgctctcccatcaagcttcagatgccatgttgtactgggggaatgtagcccttgtgctccccaccccctacctccacctgagcctcaccctgctgttgagccctgagtggctaggggaaatgggaagaggattgccatggcctggccatcttgttgctgctaggttagatcatatagctaatgaattaggcaggggagctattttttgaagatgatgaattaaatgttgaagacaagtttgagatctgtaaaatgtgattttttacttccacttataatacttgtgattggggaggtttgtggaaattcaattatgatgaaaaacctatcttttttgtaatgttggcatacttggggaatttagtggcaaatacattccccagcaggccttttgttggttgcactaactgcaagggttgcctgggaagntagagtcccattttggttgatgaagctttgaactgcggttttggaaccttacctctcctcctttagcccaatatgctgtcttgggtcctattcaaataaagttatttcctcctgga

SEQ ID NO: 6159 - DNA, 399 bp, Homo sapiens
  misc_feature (1)..(399): n=a,t,g or c
ttgcagtcagtgggttttatttgangagggggttttctgctgaactgagatggggttgattgaacggggacagagcgaagactggcagagggcacacacgggaccctggccactcccgggaccctgaccactcctaggctaggtccttcatgtcttcagtcaggcgagcctggggccccctgggnatgagcctgcatcctgagtgggcacccccgacccatgacaagcctcctgcaagggcagcttctagctcatggtccgtgagtcactcggggctggtcaccgggcactgggaaggtggccagagccgcgtctggggggccgagccaagcaacagcagcagcagcaggtgggcccaggcaaggcgggctgttgtcagagccttcctgcagctgctgc

SEQ ID NO: 6160 - DNA, 518 bp, Homo sapiens; identical to SEQ ID NO: 4223
  misc_feature (1)..(518): n=a,t,g or c

SEQ ID NO: 6161 - DNA, 539 bp, Homo sapiens
  misc_feature (1)..(539): n=a,t,g or c
atagtaagaaaatgtcaatttaatcatttactttagcaggcaagcaatttgtaaacattcagtagcggcagatccaagttacaaacaatttaaaaagaaccaagattagtgattataatttttccttccctttccccaaaagaaaaaaaaaatgatttggaaatgaatgacttaaaaccctacaaacattgaacattcagttatgtcttctatcagccttctatgcatcctctctgttttattttaaaagatgtatctactcctaaaatgcnttatcttgtaataacttgtacgtgagcacttgcaatctaggaagttgttcctgcacatcactgtgcatatattatcttagtttaaatcccatttgcaaagggaatatttatgtcttgattcaatggcctcttgacttcgagtgggcgggtatcaaaaaggtgatcttccacaacaaggcccgcttttctgagcatccgacactgggcccagctggctggccagggcggtccaagcagttccccttcagctccagctgagtgagccgg

SEQ ID NO: 6162 - DNA, 421 bp, Homo sapiens
  misc_feature (1)..(421): n=a,t,g or c
tttttttttttgggggatgtgatagagaggatttattcatttgataatagttagaacacataacctctgagatctctgtaatctcagatactttagttctataattctaaatccaagggtctctatagataggcttgagacaagtgtaaacaaactcatgatctcagagaaatcttcaagtggcatgtttcaatggtatgcttattaaacaaatgctcatgacagattttcacaacagtaacgaatgttatttcacaacatcaaatcttccttcctcaggaagaaatgacattaataagaaggttgatggatttggattatttttcatgtttcctggaggtaaaaccagngtcccccacttgnttttccncctttttcccccaattttgnagactatttgggtttcaatttccttgcctcc

SEQ ID NO: 6163 - DNA, 451 bp, Homo sapiens; identical to SEQ ID NO: 1096

SEQ ID NO: 6164 - DNA, 456 bp, Homo sapiens; identical to SEQ ID NO: 5334

SEQ ID NO: 6165 - DNA, 436 bp, Homo sapiens; identical to SEQ ID NO: 549

SEQ ID NO: 6166 - DNA, 421 bp, Homo sapiens; identical to SEQ ID NO: 550

SEQ ID NO: 6167 - DNA, 466 bp, Homo sapiens; identical to SEQ ID NO: 1097
  misc_feature (1)..(466): n=a,t,g or c

SEQ ID NO: 6168 - DNA, 449 bp, Homo sapiens
  misc_feature (1)..(449): n=a,t,g or c
taaaaataatactccatgcattgtgggtgggcttcccctccgcagccccagcccaaggcagctgggcctagctgtcctcccccctcctctgattcatggaatgaaacttgttcatgagttcttccagctccgacccactttgctgcttctccaggaaggccttctgcatggtgagctggctgtacacgcggacncctcctcgccgcacactttcttcagctcctccttgttgagggagaagagctgcggcccggtcaagatgcccaggttctccacgatccgcgggctgaaggctttggcttccagcaaggcgcggacctcgtcggaacccgactcgtaggtgagcggctggctcacgggctggctgcgctccacgcggaagtgcctctgtggctgcgcctgatgttgctgattttccggatgagctcgtcgttgaactcgtccaatgt

SEQ ID NO: 6169 - DNA, 552 bp, Homo sapiens; identical to SEQ ID NO: 5638
  misc_feature (1)..(552): n=a,t,g or c

SEQ ID NO: 6170 - DNA, 400 bp, Homo sapiens
  misc_feature (1)..(400): n=a,t,g or c
gtattataaatctgctttatttagcantttctnntagcgaagagcacagaaatcancncngnnnnncaggctttgtacatcataggactagtcacttgtgctttcatggatactgcctgggtgggggttcacaacacttataagttagagagtttgagagccagtggaaagtaagtggaagttgttctgaaataagcccctgnaattttctgcaatgaaaaggagcagaggtcattttcttataatgctcagcctcagagatagaacactggaggcaagaaattaataatttagtancaangtggaaggctccagtggngattacatcatgatgtaaaatcagaggttgatctggatgngttgagcaaatgggtgctcagatgggtattagaganagaga

SEQ ID NO: 6171 - DNA, 438 bp, Homo sapiens
  misc_feature (1)..(438): n=a,t,g or c
ttttcaagtagangtatttttatttnaaggcaccntaaaatgntgatntctctaagaaatacctntccttccgtgtgtgaaaatccttgggggaaaaaaaatcccacacggtgttcttggccatcaggatcatgaaaacaaactttggtgaatgtgagcaactgcgccagacaggacacaggttacagggcctgacgtcactaacggtaactgacaatcttggaatggaccctactgctgatgtttcaaaaggacacagaggtgaactggtcacttctaattaagaagagccagtggggtgggggaagctgaaaaccaaaaatccacgtagacatacgtggcagtngtgaacgtctgtcctccccttccttctcctcacttcctctcctcctcctcactcaggntgggtattctccngggtgtgcggatgtcagctgc

SEQ ID NO: 6172 - DNA, 565 bp, Homo sapiens; identical to SEQ ID NO: 5808
  misc_feature (1)..(565): n=a,t,g or c

SEQ ID NO: 6173 - DNA, 371 bp, Homo sapiens
  misc_feature (1)..(371): n=a,t,g or c
tttttcattccagttattttaatgttatttactagcagtgtgccctcgtgcacattatcaaactcctctgactcttggaatcctcatttttcaataataactcacaaagctgtcaancctaagggttctaacagctcgaacagcacctggaacagaagcaatagccgccactcagaggttacttcttccttctccgccttctctggatcacctccctacctcatcctcaatctaacgctggaaatattggatatggggtaggtcaccaaatgttgccagaagactcaaattatgccacccatatctcagctgggaagggcttaccgtggcctgactctccttcagggtccaaagtccccatttaatgaatg

SEQ ID NO: 6174 - DNA, 459 bp, Homo sapiens
  misc_feature (1)..(459): n=a,t,g or c
ttaacgttttccttccccgcatttatttaattttcccatggtggttaacagtaaatccctaaaagactgatttagttcattcatttattccagcaacaaatatttgagaacacactgtgtcccagacactgttctaaggactggcagcgaagtccaagacaaacagtccctaccttcagcaagtttgcagtcaagcaggatnggaatnctgagcattacaagggaaatgattattctgagagaggaagtatggggtgctatgggaacatacaaccagggacctaattttatgggaaagggaccagcccagatccaacacttgctctcccagtttacctccagtaggttctttttaacttgaactaatcttgtttggtggggtacacagtgaggaaaaagaagagctagtgaccaaatctaactcccttctcagtcttaagccaggtgaaggcaagggag

SEQ ID NO: 6175 - DNA, 424 bp, Homo sapiens; identical to SEQ ID NO: 558

SEQ ID NO: 6176 - DNA, 432 bp, Homo sapiens; identical to SEQ ID NO: 559

SEQ ID NO: 6177 - DNA, 398 bp, Homo sapiens
  misc_feature (1)..(398): n=a,t,g or c
tttttactcttatgttatgaatatttatttttttctccttaaaaatgtacaaaaaataaaataactgtatttatagtttatagattccccctctcccatttacaaaactattaagttacatttaccttttttttttaaaacatgagagcaaattgtacatatatcaatctcccttgcttgtctttaagaaagggccgttcatagcatttggcacaaaccctctatttctgttgcatttgcatgattttaaataagaaggaaaataaacatttgatttatttcatgcttcctaagtttctgggcagggacatgcctnactcttttaggaaaccaattccaagatgacatcnggactgcatttttctgttggtccgaactttctaaacaaacactcataa

SEQ ID NO: 6178 - DNA, 371 bp, Homo sapiens; identical to SEQ ID NO: 5725
  misc_feature (1)..(371): n=a,t,g or c

SEQ ID NO: 6179 - DNA, 214 bp, Homo sapiens
agtgttgaggattttttattgtgttttccacatagataaaaaaataaggctttttgatgaaaagaatccattacaaagtcaaaaatccattacaattataattgaatcagtaacaaaatttagctttaaatgagtcaagtattctgcatttgaaatttaatatcacaaacattcaagattagtgaattttggtaagaaaaaaatactggggggg

SEQ ID NO: 6180 - DNA, 374 bp, Homo sapiens; identical to SEQ ID NO: 561
  misc_feature (1)..(374): n=a,t,g or c

SEQ ID NO: 6181 - DNA, 436 bp, Homo sapiens
  misc_feature (1)..(436): n=a,t,g or c
ctggctgaagcatccccttggagtgccatgtataagttgggctattagagttcatggaacatagaacaaccatgaatgagtggcatgatccgtgcttaatgatcaagtgttacttatctaataatcctctagaaagaaccctgttagatcttggtttgtgataaaaatataaagacagaagacatgaggaaaaacaaaaggtttgaggaaatcaggcatatgactttatacttaacatcagatcttttctataatatcctactactttggttttcctagctccataccacacacctaaacctgtattatgaattacatattacaaagtcataaatgtgccatatggatataccagtacattcctaagttggaatccgtttacctcctgcctagaattttaggtgtgagattttttggttcccaggtatagcaggcn

SEQ ID NO: 6182 - DNA, 444 bp, Homo sapiens; identical to SEQ ID NO: 878
  misc_feature (1)..(444): n=a,t,g or c

SEQ ID NO: 6183 - DNA, 476 bp, Homo sapiens
tttttttcaacttctctaaatctttttttgctaggtctataatttcaatggtttctttgtctgaggatagtatggtaggagaaaaagttgatgatccgctgaaatatggcgctcttgctgtggctcttgtcaagttttttcgaaggttctcattcactgcttcactttctaataattttgccctgagatcttcgatttcttttatataactatgaatcatattactaatctcctcatttccttcacctgctctggcaagaacatggttggcctgatcactaacaagctgtgtaattctggacctcaatgcatcaaccgtctcttgcatggctttaattcttacacgcaggttattattttcagtctgtagcatagcattctcatgaaacatgtcattgatgctttccacaccctcttcgtcaattattcttttacctggttttgtactccatgagctccatctgaagtcgtgtgag

SEQ ID NO: 6184 - DNA, 75 bp, Homo sapiens
tcagaagccacttatacagagcctccttctcacaattctcatcacacacacactctgcaaagcttgtgcagggct

SEQ ID NO: 6185 - DNA, 701 bp, Homo sapiens
  misc_feature (1)..(701): n=a,t,g or c
taagagtgttcaatccgagatgaatcatttgaagtatttttatatgtatatctatttaaaactaatatattattaaagcttaattgccatgccgtttatcttctctgaaagaacttcaaatcttacctgccaacatattcaccataattattttttaatacctttcatacaataacttttttaaaaaaacctcagattgaaaaagcaacctaaattactttcgctctctaatcagcatttcaatgtatttatttttaaatgttctcaaaaagtaactaaaaaattgtgtcggaccctacttttgagaaatctacgtttcccaagttttatgggaactggctattccttgtcccggcacaccttctcattccttcctttcagagcctaaaacctcatttgataagcactcctagtctctggcctgtggatccagtgctattctggtcaccaacctaagaatcccaattgcacccttctggtttctgacagtcacaggtgacagctgtgattctataatacagactggtgtcttagaaggtaggaataatacatgatttatggaagcatcaccctggntaatacataataatgtctttttatatanaaggggatgagttagttcctttaatacantggacagaaaaaatgaaaaggtggactttgtaatacctttaanccataaaanttaattaccccanaga

SEQ ID NO: 6186 - DNA, 339 bp, Homo sapiens
cttggatcaacagcccgccagctgattgactgtttaggaatgactgaaagaaaccaaaacagcctgtccactgctgctgtgggatggaggaggcgtaagcagaaacattaacagtatattgacctcttagcagaaccgcttccattctggagatcacggctgctaaatccagcatccccacttcattttacccccagcatattgttctgtagtcttttcttgaaacatcttgattgcttttcctcggcagctttcaaaaaccaaataataatagttatccgtcttctacttcatgggagattgttttggtgccctcaccctctgaaggtgcccagttcc

SEQ ID NO: 6187 - DNA, 457 bp, Homo sapiens
  misc_feature (1)..(457): n=a,t,g or c
ngtcctttctatgtcagcattcagagttactggctgtcatttttcatggtgatgattttatttgtagctttcataacctgttgggaagaagttactactttggtacaggctatcaggataacttcctatatgaatgaaactatcttatattttcctttttcatcccactccagttatactgtgagatctaaaaaaatattcttatccaagctcattgtctgttttctcagtacctggttaccatttgtactacttcaggtaatcattgttttacttaaagttcagattccagcatatattgagatgaatattccctggttatactttgtcaatagttttctcattgctacagtgtattggtttaattgtcacaagcttaatttaaaagacattggattacctttggatccatttgtcaactggaagtgctgcttcattccacttacaattcctaatc

SEQ ID NO: 6188 - DNA, 404 bp, Homo sapiens
agacagagtctcactctgtcacccaggctgaagtgcagtggcactatcttggctcactgcaagctccgcctcctgggttcacactattctcctgcctcagcctcccgagtagctgggaccacaggcgcctgccaccacgcccagctaattttttgtatttttagtagagatggggtttcaccgtgttagccaggatggtctcgatctcctgacctcgtgatccgcccgcctcggtctctcaaagtgctgggattacaggcgtgacgaccgcgcccagccagcttctccaagttttaaaggattaaagccctcaaactctcaggcttaaatcaattcctaatgtgggatatgttctccaagtatgcctaccaaagccatacaagaataaagtgagcagcagcagc

SEQ ID NO: 6189 - DNA, 476 bp, Homo sapiens; identical to SEQ ID NO: 1502

SEQ ID NO: 6190 - DNA, 388 bp, Homo sapiens; identical to SEQ ID NO: 1288

SEQ ID NO: 6191 - DNA, 447 bp, Homo sapiens; identical to SEQ ID NO: 4311

SEQ ID NO: 6192 - DNA, 335 bp, Homo sapiens; identical to SEQ ID NO: 1069

SEQ ID NO: 6193 - DNA, 377 bp, Homo sapiens
aactcatgtaaagctcattgtaatagatgtagtttttctaatctacatttttattgactgtcatctatcaaaatattgacttaaatcctgtaactatttgatttcaagctttaaattgatctggtattccttgcggggctccagttgcatctaaatagatgtgagagttgaaagacctataaggagcttctctcgctttatgatgtcttattttttttttttcctctggttgatgaaatgccagggtaaaagggatagccaaatggactaaagcacaagtgccactctagttattcagcagagtgcccagtaaaggtccaccacaataccaccatacatccactcggggatgaacagaggctgactgattgataagc

SEQ ID NO: 6194 - DNA, 278 bp, Homo sapiens; identical to SEQ ID NO: 5737

SEQ ID NO: 6195 - DNA, 433 bp, Homo sapiens; identical to SEQ ID NO: 5739

SEQ ID NO: 6196 - DNA, 375 bp, Homo sapiens
taaatacaggagtcttttaattccttgtaaggaaaatttcctggataattccatgtattttaataatcacagagatagtcctatccttattcattatcaaaaatactgtggtaacaatttatagatgcacacaatctcatctattttgacataaaaaaggcagaaaggcaaaatacaaattctgagacagagagtaaaacaatacgacatccttaggtttatttattttattgtttgtttcactgtttgaatgtttatcttgcgagagtctacagaattgagagaaaatatctgcaggctaattttacataacatgaggcaaagattaagcactaaatataaaaaataaaacttttagcttgcttattaaactag

SEQ ID NO: 6197 - DNA, 363 bp, Homo sapiens; identical to SEQ ID NO: 32

SEQ ID NO: 6198 - DNA, 453 bp, Homo sapiens; identical to SEQ ID NO: 1567

SEQ ID NO: 6199 - DNA, 423 bp, Homo sapiens; identical to SEQ ID NO: 1111

SEQ ID NO: 6200 - DNA, 391 bp, Homo sapiens
ttttttggctcaacagagacaggtttattttgggaataaacctgagaggggcttctggccgatttcggtcagggacattctcttacagactaagggcatttaagggtttaggaagggggagcctaccgcaggctgcgaagtgtttctgtgtgaaggagagttttattgcagagttggaatatctctggctggaggggaggttattctcaggattggcatgtttctggtcagatgggggtttatctcatggttgaaatgtttctgctcatactgacatgagccattaggctgatgttttgggctggtttttaatcacggagaacttaaaatggccatgtttgtccaagatggcaatgctcctgctgtcacacccacccacccacagggtact

SEQ ID NO: 6201 - DNA, 412 bp, Homo sapiens
tttttttttttttttttttttccaatcacctttctggttttaatggtactttttggccacggaggtccattaggtagagaccattaggtaaagagactcaagagtgtggagtggagtgtggggggttgtgggaggaggtggaaatagttgcaaaaatatctctctgtacacaaaacttagatgtcatagtggattttcccagaacatagcattcacattattgaaaacagcaagattcacttttcctaaaacacaaagccaagaacataaaaataaatatggacattctagagtcctgaaggcctagagaacacatccatagtctggactttagagcagcttagaggcagaagttctgagtcactgaggtccaaggtggagtccagaggaggctgggcccttgagatgaagt

SEQ ID NO: 6202 - DNA, 165 bp, Homo sapiens
ctcgtgcaagtggtttattgatggagtgctcttaggagaaggggagtgagggaagcagcgtaggacagaggaaaaaaactgagtaagaatgtgctctcagaagaagactgacttcagcttgattccatgaggagctctgggaaaggaagttccttgatgtaagag

SEQ ID NO: 6203 - DNA, 409 bp, Homo sapiens
ttttttttcagaactgcagagtaaatttattgggtggttgtcggttaaaatgacaaatgatgatctgaattcaatacattaaattgctgatagaattgcaaatttcaactgaatttacattgaggcctagcagtggtagttggctacaactggaacagtttatcacctcagggtatttgagggcaaggaagatacagaaaaaaaaaaattaggggtatgcaacacaatttaagtgctcagaaataaattttaccacagtgagaacgaaaccacaatgacatgttactaacactgtgcagacgtcatggttgaatgcctgcgttctgttccttcctggtggcagccgccttggttcattagttctcatgtttgcagctccttcacatgccccggagcttcccaagtgtgc

SEQ ID NO: 6204 - DNA, 330 bp, Homo sapiens; identical to SEQ ID NO: 3047

SEQ ID NO: 6205 - DNA, 162 bp, Homo sapiens
gaggttgtctgtttattggtgaggaaactcctcgagagttaatacagtgtaatcttttcccagaggtgtgtagagggaagggggcctagaggcatcccagagatagcttatagcaacagtgctttgaccaagagctgctgggcacatttcctgcagaaaagc

SEQ ID NO: 6206 - DNA, 377 bp, Homo sapiens
  misc_feature (1)..(377): n=a,t,g or c
gagattaaacaggcaagttttattatcaaatgttaactctacaaaaactcagtagtattgtagtaagcattactgcctatcttaaagtctttcagagctttgggcagctttgggcatcttaaggcatcaagtatacagaaatttcttttcgatcttaagtgccagttatcaccaattttcacacaaacctttttttttttcttcctattgcagttaaagggccattgccagtcagctgaagaaggaaatgtttgcttctccctttaaggtgttaaagtaatgcacagaaaataaaaatagcagcctcataaatctgcacggcattgcattcaagcaaagggncaatatgagtaacttaggggaaatatccacattca

SEQ ID NO: 6207 - DNA, 491 bp, Homo sapiens
gacagcagccgcctcgccatgaagctgctgatggtcctcatgattgcggccctcctcctgcactgctatgcagattctggctgcaaactcctggaggacatggttgaaaagaccatcaattccgacatatctatacctgaatacaaagagcttcttcaagagttcatagacagtgatgccgctgcagaggctatggggaaattcaagcagtgtttcctcaaccagtcacatagaactctgaaaaactttggactgatgatgcatacagtgtacgacagcatttggtgtaatatgaagagtaattaactttacccaaggcgtttggctcagagggctacagactatggccagaactcatctgttgattgctagaaaccacttttctttcttgtgttgtctttttatgtggaactgctagacaactgttgaaacctcaaattcatttccatttcaataaactaactgcaaatcactagaaaaaaaaaaaaaag

SEQ ID NO: 6208 - DNA, 305 bp, Homo sapiens
ttttttttttttttactttacgcatttttaataacaatggtacccaattcattaacaaatgaatttaggcaatgtgctttgctctacaatccatcagatacattttcactgcagatagttcagaaatcattttggaaatagacacaaacatgtacatattcatttgctgaaaatgccacttacagctttaatatcaaatatagttatcatagttcacagaaaaagtataaagtgcaaaagctccacttcaaaaggccttaagtcactcccaaagcaatgaggattaaattttaccacagccagtg

SEQ ID NO: 6209 - DNA, 457 bp, Homo sapiens; identical to SEQ ID NO: 1519

SEQ ID NO: 6210 - DNA, 391 bp, Homo sapiens; identical to SEQ ID NO: 4924

SEQ ID NO: 6211 - DNA, 477 bp, Homo sapiens
ccaggctggtctctgtggtttttattagtgtttcctgggacccatcaaacaaataaacatattttgaaaaatataattctttgacaaaacaggaatagcaggaatagtttgaatttaacatagcttagagggaaagatttctgattttttttaaatagtagcaatagagttgtttccacaaattgtcaacccaggagccagatggaaagaaaaacaagaattatgcagataactacagaaagattaatcccaatttagttaaacttgtgaaggcttgtacgtttcagaggttcataagacacagtctcaacaggagttttttttaataaatgctctatctctagttccagaaactgaattccaagaagctacactgaggataattcagctctgatattgtgattactgtgatgttctttcattcatacagtaagtatctgcccaatacgtaactaccgagatctattgcttcctaca

SEQ ID NO: 6212 - DNA, 267 bp, Homo sapiens; identical to SEQ ID NO: 5747

SEQ ID NO: 6213 - DNA, 452 bp, Homo sapiens
ttttttttttttttttttttgcccctttatgtatttatttatcaaaacactcgcaaacctgacctcactcaccaacacacacacacacaaccaggacacatgtgccaggccttatgaaaggctatcaagtactttgaaggacaggaaggaatgaacacacccaggtggacgtttggtttcatttgcaggggttcagggagggttgcaggggttcagggagggctcttgtcccacaaccggggaagggagagggcagagcaaggcaataaatagaaccctgggcccagcctgctttggtacattgtgggtgcatccctgcatgtggccttggcagcatctgctcccggcccttaaccatcagcaggagtcaggagggtggggcccaggcagctggtgcaggcaggccagatgtgcagcccaaggtccctccaaatagccctggagccctgcag

SEQ ID NO: 6214 - DNA, 471 bp, Homo sapiens
tttggtagcaaacttttatttaaatcttacataactcaagctttataaaaagccaacataattgaaaattgggttctccctctaaagccttaagtattcaaagctcaaaacagttaatttaaaaataagcaaacaaataaaacaaaaaaaccctgccagcagatcctgctgaaatactaaaaaaaaaaaaaaaaaaaaaaaaaacactaaatgagcttaatctttacaaaagttacgttagctcaaaagctataaaatcaaagttatcttaattctacaaagaagggagagggtcttcatgccaccatttccttagagcctcatctttttcatccaatttggccacaaatcaaatttctgtgtgcccctgttttcaagagattcctcttgcagaagaggccaagtataaacatggaagagtaactgcctaagtaggaaagtgttccataataatgtgcaaacaaggagttc

SEQ ID NO: 6215 - DNA, 364 bp, Homo sapiens
ttgggcggcaggatgctggtttatttactgtaggatctccagggccatcaaagccccctcgtgggatagggagactatttacacagccagggaggagggcagccaggaggcagagaccgggtcccgtatttccctctgcccgaatgaggaggggaggggcgtcctgggtcctgcagctgtagtcttggggttcagatggaaacttcatactcccgcgtatccccagcttcatacagcgggttgctgaagtccgactccacggtgatggggctgtaggagtgggagcccgagaagccgaaaagggactttccctgaagcttggtgtagtagatgtaaacgccactgccgaggacaatgaccaagc

SEQ ID NO: 6216 - DNA, 436 bp, Homo sapiens
ttttttttgagtgtaaagaaaggtttactccttgtatcatcccctccccgtggactgcttcaattctattggggacaggccagtccctggaggctgcaaggagccacaaacctttcccagctcacactctgcacccctcagtctctgctgctaaagaatcagactcaggtagatggggtgtccacagtctgtcctcattacccagtcataccgggtagcatggcccgagagagcccttatctctccccaccttaaaaccctcagcatcacacagcaggaaccagtccacagggcttaccaaggatacgcagtgaaaacagaataatgtctgttacaaaccccctaaacctgagatggctgaagagcagattcctgcaccccatctgactcccccaggcagtgggagatgacccaaagcccccattccctgggcaga

SEQ ID NO: 6217 - DNA, 96 bp, Homo sapiens
ttttttgcaatgaaaaccctttaatgttgggctttctttaaataaaacagagaggttgcagctttcccatggtggctgtaaggcaagaacagcagt

SEQ ID NO: 6218 - DNA, 412 bp, Homo sapiens; identical to SEQ ID NO: 598

SEQ ID NO: 6219 - DNA, 245 bp, Homo sapiens; identical to SEQ ID NO: 3172

SEQ ID NO: 6220 - DNA, 384 bp, Homo sapiens
ttttttttttttttgaaacaaagtttccctcttgttacccaggctggagtgcaatggcgcaatctcgtctcaggagaatatgcattttaacacgctcccctgatgatacttctgcccactaaagctgtaagtcctagcaatgcaagccttactgttaaactatttttgacttaaattgagtgccagtttcagaaaatcagttatttcattttaaactttattcccagtaggaaatatgagacatttacagatggtgcctgacttacaatggttcagtttaggattttgcaacttcaagatggtcaaaggtgattcccattcagtagaaaccgtacttcgagtatccataaaccattctgtttttatgctttcagtacaatattc

SEQ ID NO: 6221 - DNA, 305 bp, Homo sapiens
ccatgtggtcggtttctttattgagaccacagacggtagcgcaggtccctgctgtccacatgccccttgtagggacaggaggcccttcccgagtccaagtccgaatgccgggtccgggccgagcccacggccccgagtacaagtccgggttccgggtccgggccaagcccatggccccgagtccaagtccggatgccaggtccgggccgagccaacggccctactggctactactgggaggggctgcttttgctttttggtgaccagatcttggacaagcggaacttggacttcttcctctggag

SEQ ID NO: 6222 - DNA, 240 bp, Homo sapiens; identical to SEQ ID NO: 1131

SEQ ID NO: 6223 - DNA, 257 bp, Homo sapiens; identical to SEQ ID NO: 5344

SEQ ID NO: 6224 - DNA, 313 bp, Homo sapiens; identical to SEQ ID NO: 5613

SEQ ID NO: 6225 - DNA, 305 bp, Homo sapiens; identical to SEQ ID NO: 5753

SEQ ID NO: 6226 - DNA, 424 bp, Homo sapiens
tttctttcttttctttcttttctttcttcctcttcttcttcttttttgcaaataatttacaggcatatgtaaaatacagtaagaatactgggtcatagtttcatccagtgaaactctgtgacaatccttcactagaaggagagtacttttttcacacagtcaggggatgaggatctgatccgaattacattttgtcgagtcactcattcccacagatttgagtttgaatgcagcttgtggggtacatcatcaggaacattgcacaattattttatgtcatttaaaagaatgatggaaaggaatgttaccggtgcttaaaggcctcagtaggcactcaataattttatagaatagttaaataaatattgcttacacataaaaactcatctcatttcaagatgagggggaaaaaggcatttgggaa

SEQ ID NO: 6227 - DNA, 510 bp, Homo sapiens; identical to SEQ ID NO: 5345

SEQ ID NO: 6228 - DNA, 427 bp, Homo sapiens
tttacattgtataatttaaaagctttatttccccccataatttgcaaatagatttcatattagttccactggaagttttcttcgtacagttgcctttctcattgactatgctgttggtggggaaaactgctttctcatgaggggaagggttagatttcatagagatgctctgagctaatcacataaacaagagggtttgacctggcagcctctgaggcagtcaaggaggtcaagaaatcctttcagctaaaggcctagtcaggtgggactagttgccaggatcctctctgcagaactgcccaaacgtagctctctttgaccaggaagcctggaagtcagaccatcttctcaggccctgccaaattcccatcctcagtcctgtggcctcatgcgggaacattttatccaagcaaaccactggctttcg

SEQ ID NO: 6229 - DNA, 326 bp, Homo sapiens
  misc_feature (1)..(326): n=a,t,g or c
tttcaaagtataaattcatattttgtaggaaatgtagtttacaaaacagtatcaattgctacccccaattcagatgacccactttccccgggatgtgantgtttaggtcctattccactgggctggggaatccctctttcccacctttggggaacagggtggggagggggtaagtgggaccctgctgcctggagggctcaggtctgagcagcagggagccctcagcgcccactccagcagacctattgggaatttactacctgaagacaaattataggtctagggtcttctttgtgattttgggggagtcgaggcattggggggtg

SEQ ID NO: 6230 - DNA, 442 bp, Homo sapiens; identical to SEQ ID NO: 1611

SEQ ID NO: 6231 - DNA, 495 bp, Homo sapiens
tttttaatgtagaaaccacatttattaaccatggatttactgagggcagtttattaggtattatccatcgcttatgctgacatctgattttgcagagaaattatagccattattttattaagataattctacgagatcaatttagtttcttgaagtagcatatattcaattcttcaatagggtttggtttaatttagctatcaaagtcagatgtctctaaactttacacactaaactcatcgtgagcagaaaatttattctttgtacatattccttctgttttggttcttcaagctgaaacatctcaacttccagaaatatggttgccagatcaaaaataccagagtcctaaggggttaagatttgaatccagaaaaaggatacaggtaacacattgtattatatacaaactagcaacaacaaaaagtttcatcatgtaaacaaaagaatataaattatagacataattggaagtttcaaacagtccttaaatca

SEQ ID NO: 6232 - DNA, 310 bp, Homo sapiens
ttttatcaaatgaatactttattagagacataacacgtataaaataaatttcttttcatcatggagttaccagattttaaaaccaaccaacactttctcatttttacagctaagacatgttaaattcttaaatgccataatttttgttcaactgctttgtcattcaactcacaagtctagaatgtgattaagctacaaatctaagtattcacagatgtgtcttaggcttggtttgtaacaatctagaagcaatctgtttacaaaagtgccaccaaagcattttaaagaaaccaatttaatgccaccaaac

SEQ ID NO: 6233 - DNA, 410 bp, Homo sapiens
taaattctggacttctcagagcctttaatgttctaacaagcacagtgaatttccaagagacgatatagcacatgctacagtttccagacacatttggctaaggaacccttttctgagaataccctaataatatcccctgaaacaataatcttcagaacatgagaaataccagattagacttagaaggctctttctggctcccccattctaagattctaaataagattcaagtattagtctaggggtctcaactctccagggtgcttatactaacatctttttttttttttgagatgcagtttcactcttgttgcccagactgagtgaagtgcaatgacgcgatctcggctcactgcaacctccgcctcctgggttcaagtgattctcctggactcaagcaatcctcccac

SEQ ID NO: 6234 - DNA, 427 bp, Homo sapiens; identical to SEQ ID NO: 3986

SEQ ID NO: 6235 - DNA, 253 bp, Homo sapiens; identical to SEQ ID NO: 1175

SEQ ID NO: 6236 - DNA, 345 bp, Homo sapiens; identical to SEQ ID NO: 1390

SEQ ID NO: 6237 - DNA, 534 bp, Homo sapiens; identical to SEQ ID NO: 5656

SEQ ID NO: 6238 - DNA, 454 bp, Homo sapiens; identical to SEQ ID NO: 945

SEQ ID NO: 6239 - DNA, 372 bp, Homo sapiens
acaatctggtagctgtttattgttctctgttagaagtctatatataatgaaggcacaatgagggggagggaattcccctgctacagtaccatggaaggggctggggctggggagtgggcctgccaacaggcagtggtctagtagaggttttctggaactagcctcagcttctcaaatgggccttaggacacagcccatgggggagggggcagagcaggctggctctgaaagccaaggatagctaagggtggccacctctaggcccctgacgcatggtcagcgtggggtctggctggatggggtggggcagggccactgcctattctacattcaagtgtcgctccctccgtggtcttgcagggtctctctggg

SEQ ID NO: 6240 - DNA, 222 bp, Homo sapiens
cttttttttttggagactagctgaggttttattttggaccaaaaaaaaaaagcaattgaattgttttgtagctggaggcatgggcaaggggggtccagggtagtaaactccccaggtggcctgagggctagggctgagctccaggctggtgtctcctggttcccagtgtctaccctggcatagcggcctcccttccccagtgctctgtggcagacgcaggag

SEQ ID NO: 6241 - DNA, 412 bp, Homo sapiens; identical to SEQ ID NO: 3483

SEQ ID NO: 6242 - DNA, 522 bp, Homo sapiens
atgtgaacgttgagtacacatgagtgcgtgtatgcccccaggctgggtcagctcttctgtggattgcatggcgtgtgattaaaagcccatgtgttcccacacatccacatcatgggaaggttaatgtgtgcctccttggaactgggtgttggtgtccatggaacttcctctctgtatctcaggtcagtaggcgcagaaacgcctcatgatgaagattcttgagccccatttccaagacccctcacatccaatcctgtcctgtaacatccatcaaggatttccataggggtgactggtgcccacccaagactgcaccagtgcctgctcattgaggagagtaactgctggccaggcagaaagaatatgggctctgcaatgagacagacctggaggggactctcccgttgagcactagcagctggaggagttgggagttcatggctatcatggttgtgttaatcgattgtggggatgaaatgtcattgtgtatggaaggcggggctcatggctgattggcaataa

SEQ ID NO: 6243 - DNA, 411 bp, Homo sapiens; identical to SEQ ID NO: 1578

SEQ ID NO: 6244 - DNA, 495 bp, Homo sapiens; identical to SEQ ID NO: 3193

SEQ ID NO: 6245 - DNA, 275 bp, Homo sapiens
gactgttcatggccatctttattcccagtgctggctatcccaagatactgccaggccacagccaacccccacctctgccaatgtgactgggtcaccaccccatacaccagagcagccttgagccctgccccaccccctgccctgcggaagctaagtccccagctataagaccctgcccctcctggtggcccaggaccctcaaagatgcacacaggggccccagcgagggctgcaccgtcattagccttctcctccaggctgggctgccaagcagc

SEQ ID NO: 6246 - DNA, 501 bp, Homo sapiens
taagattttcctctttactctcgtccttacatgtccacagacttcatgtagagaggctgagcctttcgaccacaaagtgtgttctgtgttgaagatgttataatgatgggagagggcagttgcagcagcttctaaccaagtgtctacaacacatgtactactgtttcctacctgtgtcacctctgcaaaaaatggagctctgagcccagttctgtgagcatggtgtcagagccctccaaagtcctgagaaatcaataccagggatccaaatctcagacaccagtttgaagcaatacctggataccaagactcagagtgaggatatggattttgggagctgacagttttgctgatcctgccacactggcaagggctgaagtccagaaatggtgtgtagctctagtcattcttattcaccacagctcttatttcacagttttttcccttggtttcttctgtttcttctgttcctcatattcaagtattttctgttggaaatag

SEQ ID NO: 6247 - DNA, 523 bp, Homo sapiens; identical to SEQ ID NO: 2527

SEQ ID NO: 6248 - DNA, 395 bp, Homo sapiens
tttttttttttttttttttttttttttttcaatgccaaaaactggtgatttatagaaatcaccctggtttatttttttcaacaaaggaaaaaaaaacatggttcaataattcagcatttgggactctggcaagtactgtctgcattgttcaaaataagtgttcctggctgtgagctctgcaacacatactgatggcccaggaaccttcttccatggttctaataaaacaaaggacccacacatggaggttacgtgagtcaacaaaagatgctctatcacaatgtgcgtaaaaagcaagtctttgaaaaatatccagatctctaaaggaatacaaacactcctatttggttttgtttttgttcatcttcagtattatattttagttgttgaggaaa

SEQ ID NO: 6249 - DNA, 506 bp, Homo sapiens
tttttttttttttttttttgagctgctgggaaccatgtttttgattttcagacaggtgttaattttaccaggcttcattaatacagaagaaaggaaacgtcttccaggaaagcagccactgcggaaacgagtgtgtccggccatcaatacacaagagactctttgtgactcaacacgtggggtcgcgaggcagagctggtggcactgcggatcacttccatccacctttcgaacgtgtactcgctttccgccctgaagtagtagacgtgggacttgaagtgcagcttgaacacgtagtctttctggatgttctcggactcagaggggatggtgagcgagtagccgagcagaggcaggctggcaaggggatgattgtcctggtgtgatttgtagaagaacaggcagaagtttgtgaacaccacccacagcttctgccacccgttgctgtttttgaatttcctcagcaggtttccagacaactgattctccactgcgatgctgaagtc

SEQ ID NO: 6250 - DNA, 413 bp, Homo sapiens; identical to SEQ ID NO: 5968

SEQ ID NO: 6251 - DNA, 229 bp, Homo sapiens
ttgactatctttggaattcatttcattaaggttttcacaaaatacaaagctcaaacgtaatcatctatgtccaccacaaaacagaatcaaataagtggttagcacaacaaacatagtgatcttttccattttaaaaaatataaataacaatgttcaaggttttacagttttcttagtgtgtgtctttttaaggctttatgttgcagacccttcattaatggtacttgta

SEQ ID NO: 6252 - DNA, 472 bp, Homo sapiens
aaactttggcatttttattcagacacgtataaaaacaaaacaaaaaacttcagtgatacaacagacgttttcccttagttccccatccaaggggacagaggtgtgcagctgaagctggatcttttttctgtcctacctggaagcttctcactgctggatgagaatggcttctaaaagtggatcttggggatccttgtgaatttgccctcggataaggagtgaagatcatttacggcacatgtggattatggtttacacaaagatgtccagttatttttccttctgactacccccaccaccacttcctgagatgagatgtctaggtataggaggatgtggctgttggggttagacttgattcagtgcaaaaacaagaaacagtgccccttaaacaagggctgtaacttaaatcagtttttcttggcaccttacaataagagcacatgcacaggaattgggaggattttgcatc

SEQ ID NO: 6253 - DNA, 445 bp, Homo sapiens
ttcaagatgtacttttaattgccaatatttttatgtatttacaagaaatattctgtaaagggtaaataaatgtacaagagagcacaaaacagaacagaaagaatactcatgcatttatacactgaagctgtaacagcatcataatggcctgggagtgttcacgcagttccctaagtggctaaattacacccaggagattctcattcagcaatataagctgttagtgctttcacacgttttgggaaatgcatccattgccccattccaagcttaattggtataataaatgtcaattaaagctcctttaagatttcaaactgcaaaactcaagtgaaactacttatgtagagactcatataagactcctctactaaaaggctctcccaaaagagacacagtatatttacatttaccatgggtacagggatacacgtcattcgcatag

SEQ ID NO: 6254 - DNA, 565 bp, Homo sapiens; identical to SEQ ID NO: 2617

SEQ ID NO: 6255 - DNA, 337 bp, Homo sapiens
ttttttatctatcaattcttccattactttcttttaattcaaacatgcatactacaaagaaaggtttctgtcctttaattttttaacagaatatacagagccacacaatacgatttcaatttcaaattatgggagatcatattcaaatatgcttaggtttgacaagttgctgttacaatactgagaactttcatgaaaacggtatttaacaatttttaagataatcaaatatctttttgctacgtgggccaacgcattaatactaacttgtttaaaaatgcagtcttttagacttcaaattattataaaacaatatcaagatcatatagatatactt

SEQ ID NO: 6256 - DNA, 457 bp, Homo sapiens
tagtttttctaagatcccttctttatccacatcacttcagccaacaatctgattggtatttccaagacaacagagcagtatttcaaactcatgaatgggattttaatgtgctgtatggaatttgaagcctcaaacttaaggaactttccacctggaaagcattcttaagtaacatcaatgaactgtcctccctaaaacctagacacagtatcactgtggaaacagagtaatagttctggaatcgattgaggattaggttagaagcgcccacaccaggaaaagcttccgggaaacggttttaggacagaatcaaggcacacctgtggaacctctttctgcatctgtcaaatggggacgctgtgtctcctctcttcttaggagaggattaaatgagccagagtgggctagcacagtgcctggcatgagactacagtttcactgggtgctatactcacta

SEQ ID NO: 6257 - DNA, 365 bp, Homo sapiens; identical to SEQ ID NO: 1147

SEQ ID NO: 6258 - DNA, 446 bp, Homo sapiens
tttcctgatgctctaggttggtttatttactttgatggaactcactggaaaattcttcaactccacgcttcactgtgcctgtgtaggatgtgttttctgggcattggatgtagatcttgtcaatcaggtactttcctggagcacatatccacccaggaaagagatttataaaaataagtaaattccttggccctgcctcccctttcagggagtttattttcttatagaaggcctcaggttttccttaagtgttttcagggtttctccattgccccccaaaagcaagatagaatccttgaactatcttcctcttttggccaagaataaatttcaaaaaggctgcatccggaagagaacccttggccttctcagctgggagctgggagcacacgtggaaagactggctcagatccatattcttgccaaatttagtcacacaaaggggc

SEQ ID NO: 6259 - DNA, 470 bp, Homo sapiens; identical to SEQ ID NO: 640

SEQ ID NO: 6260 - DNA, 1867 bp, Homo sapiens
  misc_feature (1)..(1867): n=a,t,g or c
gcggccgctcgcccctcggggaatatggcgccctcggggctgaaggcggtggtgggggaaaaaattctgagcggagttattcggagtgtcaagaaggatggggagtggaaggtgcttatcatggatcacccaagcatgcgcatcttgtcttcctgctgcaaaatgtcagatatcctggctgagggcatcaccattgttgaagacatcaacaaacggcgggaacccattcccagtctggaggccatttatttgctgagccccacggagaagtcggttcaggccctgatcaaagacttccaggggaccccgactttcacctacaaagcggcccatatcttcttcaccgacacctgccccgagcccctgttcagtgagctaggccgctctcgtctggcaaaggtggtgaagacgttgaaggagattcaccttgccttcctcccctacgaggcccaggtgttctccctcgatgctccccacagcacctacaacctctactgccccttccgggcagaggagcgcacgcggcagctcgaggtgctggcccagcagattgccacgctgtgcgccaccctgcaggagtacccggccatccgctaccgcaagggcccagaggacacagcccagttggcccacgccgtcctggccaagctgaacgccttcaaggcagacactcccagtctgggcgagggcccagagaaaacccgctcccagctgctgataatggaccgggcagctgaccccgtgtccccactactgcatgagctcacgttccaggccatggcgtatgatctgctggacatagagcaggacacatacaggtatgagaccaccgggctgagcgaggcgcgggagaaggccgtcttgctggacgaggacgatgacttgtgggtggagcttcgccacatgcatatcgcagatgtgtccaagaaggtcacggagctcctgaggaccttctgtgagagcaagaggctgaccacggacaaggcgaacatcaaagacctatcccagatcctgaaaaagatgccgcagtaccagaaggagctgaataagtattctacgcacctgcatctagcagatgattgtatgaagcacttcaagggctcggtggagaagctgtgtagtgtggagcaggacctggccatgggctccgacgcagagggggagaagatcaaggactccatgaagctgatcgttccggtgctgctggacgcggcggtgcccgcctacgacaagatccgggtcctgctgctctacatcctccttcggaatggtgtgagtgaggagaacctggccaagctgatccagcatgccaatgtacaggcgcacagcagcctcatccgtaacctggagcagctgggaggcactgtcaccaaccccgggggctcggggacctccagccggctggagccgagagaacgcatggagcccacctatcagctgtcccgctggaccccggtcatcaaggatgtaatggaggacgccgtggaggaccggctggacaggaacctgtggcccttcgtatccgaccccgcccccacggccagctcccaggccgctgtcagtgcccgcttcggtcactggcacaagaacaaggctggcgtagaagcccgggcgggcccccggctcatcgtgtatgtcatgggcggtgtggccatgtcagagatgagggccgcctacgaggtgaccagggccaccgagggaagtgggaggtgctcattggctcctcacacatcctcaccccgacccgcttcctggatgacctgaaggcactggacaagaagctggaggacattgccctgccctgacccctgccccgccccctacccctccctttccagagaaataaactcttcccgtcntctgccac

SEQ ID NO: 6261 - DNA, 41936 bp, Homo sapiens
gatctgcccgccttggcctcgcaaagtgctgagagacaccatacccagcctaaagggagcgattctattctactattcttccttctgctaatccttccattctttaatttaataacgaagattttttgagtacctgtcatataccaggtgctgttctgggccctgggaatacagctgttaacaaaatcatcaaaccacttccctcgtggagcccacattgcagtgagagagacaaacacgacacacactctcaagtccttgaagataaagaaaactgggtaacggagagaagaggccagggtttgttctataatcattaataacacgagcagtaagaagtaaaatttatctaagtaacaacttataaagggtctactgtgtgctaagctctcatccaggttcccaaggattaactcagaccacacagtaattgaatagattctatcattgtcatcttacagaggcccagagagagaaagtgacttgcctagtgtcatagctggtaacggggctgggattctaactcagccactttgggtctagtggccaagctcctaatccctttgcttgcctagggtggtccgcagaggactcacagaggagatggcaggagtgaactgcaggggcaagagagcttaatggagaaagcctgtgacatgccaggaactgcacacatattctcccattgagtcctctcctctaccctcctgacagctgaggcacagagaggttaccttgttcaaatgggtgcataggaagtcaaagtctggagctggggtttgaacccaggcagccctgagaaccttgttctttttttttgagacggagtctcgctctgtcgcccaggctggagtgcagtggcgggatctcggctcactgcaactccgcctcccgggttcacgccattctcctgcctcagcctcccaagtagctgggactacaggcgcccgccactacgcccggctaattttttgtatttttagtagagacggggtttcaccgttttagccgggatggtctcgatctcctgacctcgtgatccgcccgcctcggcctcccaaagtgctgggattacaggcgtgagccaccgcgcccggccccttgttcttaactgtaatgctgcctcctgataggatgtgcctgttgggactaagtaaggggcagtcattcattcattcatttggtatttatcaagcatcgactatgtgtcgttggtgctggggatagaggtgattgggatggctgaagtttctgtcgtcaaggagatgacattctggtggagtgagactggcagtaaataagcagataaagaaagagtatgagaatttcaaagtctgggcacggtggctcacgtctgtaatctcagcactttgggaggccaaggtgggtggatcacctgaggtcaggagttccagaccagcctggccaacatggtgaaaccccgtctctactaaaaatacaaagattagccaggcatggtggcacatgcctgtaatcccagctactcaggaggctgaggcatgagaatcgcttgaacccaggaggcagaggttgcagtgagctgagatcgcaccactgtactgcagtctgggcgacagagtgagactctgtctcaaaaaaaaaaaaaaaaaaaaagactccgtcaaggtataagaatgtcagagagtactaagtgttgcaaagaaaataacaccaggctgggtgcattggctcatgcctgtaaatttcagcactttgggaggccaaggcaggaggatcacttgagcctaggagtttgagaccagcctggacaacaaaatgagaccccatgtctacaaaaattttaaaaatttaaaaattagctgggcatggtggcatgtgcctgtggtcccggctgctcaggaggctgaggtgggaggattgcttgggcttgagaggtcaaggcttcagtgagtcatgatcgtgccactgcattccagcctgggtgacagagtgagaccctgtcttgaaatgaaaagaaaataggctgggcgcagtggctcacacctgtaatcccagcactttgggaggccgaggtgggtggatcacctgaggtcaggagatcgagaccagcctggccaacatggtgaaatcccatctctactaaaaatacaaaatttagccgggcgtggtggtgggcgcctgtaatcccagctactcgggaggctgaggcaggagaatcgcttgaacctgggaggcgaaggttgcggtgcgccaagattgcgccactgcactctagcctgggaaacagtgagactccgtcttaaaaaaaaaagaaaaaagaaaatagcactgggtgatgtgctacatggaatgacttgggctgtgaatatgatttgaggagggcctgggcctgggccttacagaacctagaaggcagagaggaaggggaggggcagggtgccagggatgaaggctcacgtacctcatgtcttagtgtgtgttcactgtcttaaacaagaatttaaagttgggcatggggcagagcggggaagggagcatccctttgcagaccccaagaagccaggaactggagcacattctgctagaggatcgatgggaagcagggttccaggggctgagcctatgtcagtcctgtttcagaggaggcaccaggcttgcttgccctgaatttctgtgggcagctcagccatgagcatcctactgttattgaggtcacagggctgcttaggccccctcctctctaacccagggattgtgcctgcctggaccaggcgtgactgctaagcttctgccaggacaagccaaatactgagggtgcttcctctgctggacgcaaaagtccaggatgaccccccaggctctgtctcggggaaggggccctgcatgctccaggggcctcacaggcctgggtctttcaaaccacccccacctgggcctgtgtttgatcaaggccctgagtgtaaacatccattgtgtgtgtcctttcaggaaatcccatagccataggagcttcctctgtttcagctttgaggatggggaaaagtggactccccgtggtgttcctagggtcacccactgtgctggggtttttctgttgttgttgttttttttctgttgcccaggctggagtgcagtggtgcaatctcagctcactgcaacctctgcctcgcaagttcaagtgattctccgcctcagcctcctgagtagctgggattacaggtgcacaccaccacacctggctaatttttgtatctttttggtagagatgggatttcgccatgttggccaggctggtctcaaactcctgacctcaggtgatctgcctgccttggcctcccaaagttctgggattacagatgtgagccaccatgcccggcctatcctggtttcaaaagtgaaaatagtcctggataaggtagaaggctgtccactccaggcatccctccggtccggtggctcattccctgctttgtccttccatgctttgggtgatggaccagcacctggacaggaggccctgttccacctcctcgggctccttggggtccaagtgcccccacctccagctgcactgcagcagagagcccatgggacctctgaaatcatgaaggtcacctttgcggtgtataaagaaggaaccagaggttggagatgtggaggaggcctggctgctgttcccactggagacctggcatcttctccccgacctaaaacaatgaaagcagtgctcagcccggatgagatcacggccagcccaagaccaggaacagggtacgccctgcaggaagaaggtgtgcccagaccttaggatggatcaaaagaagccggaaaactatattttttgtgagttttgaaaatgtcagacaggtcaaacaaaacacagtgaggtccagcctcggcctacaagatgccagatttcaacccctggcctatatgatctgtttgccatggcaggcggttcctgtccacctcttttgtttatagcagggaccagctcttgagctccagtgttgaagaggcacggtcagggtctgatctgaagacactggtggctcatgcctgtaatcccagcacttcaggaggccgaggcaggaggattgcttgaggacaggagctgggagaccagcctgggcaacacagtgagacccagagactacaaaaaaataaatttagcggggcatgatggcacaccctgctactctggagatgggaagattgcttgagcctaggagttcgaagctgcagtgacccatgatcgcaccactgcactccagcctgggcgaccaagctaggccctctcaaaaaagatacaggtggaaaaatgatggacgaagagggcattgtggcaaacctggggatttaggagaacctagtttggaattctatgaggattcaatgaaagaatgtgtgtagaggggcccagcacatagtaagagctcaataaacggtgggggctaggggcggtggctcatgcctgtaatcccagcactttgggaggctgaggcaggtggatcacttgagccctggagttcaagatcaacctggacaacaaagcaagatcccatctcaaaattaaaaaacaacaccaacaacaaaaaaacagtggcttagatgcctgatcattagggtaagtcgtgtcctcaaccccttcacatctgctctgaaggtcaccatatccggaagccttccctggcctccttgtttaaaatggcacagcccccactccacgcctggcactctctgctgtccctgattcgttttctccatacagcttatctttgtctgatatgtgacatagttaacattttatatttgtctttctttcctagttagaatctgaactctagaagggcaagggcaaggatttataactcaaaggttccgggcttaggcctcttttatattcttgattttgaggttaattaagagctcaggcctagcgaggtggctcatgcctggaatcccagcactttgggaggcccaggcgggcagatcacttgaggtcaggagttccagacctgcctggccaacacagtgaaaaacctgtctctactaaaaatacaaaaattagccagttatgttggcaggcgcctataatcccagctactcaagaggctgaggcaggagaatcgcttgaacccaggaggcagaggctgcagtgagccaagatcgtgccactgcactccagcctgggcaacagagcgagactccatctcaaaaaaaaaaaaaaaattaagagctcaaagagtttgttttcataggcagcagaatgagaaaagtttacaaaatagtttaaatgacaataaagtcattatagattaacataaataaaataccttttatgaaaaaaataatcattttctgaaatcagacaaaacattgtgaatgagaaggtggcatggttttatttttttgcaagtctccgaagcctggctggatagaagagcctggcttctcagagctgcttcagtctgttgtgatatctattgtatgtcacgtagcctctggaaaactccacagttagtattgttgggaaaataactttgacctcaggatctcctgaaaacgtcttggggaaccccagggtctagaggctgcagtttgagaactgttgctgtggtatcccaggtgtctcaaatactgcctagaacataggtggtactcagtaattattgttgaaggatgaatgaatgaatgaatgaatgaatgaatgaaagaaagaaagaaatgtgtctttgaatccagccatgtgcccagaatgatgagacagatgacaaaagctaagggactttagcatgaggagagggggttcgtttccttttttttcttttttttttgagatggagtctcactctactgcccaggctagagtgcagtggtgcaatctcagctcactgcaatctctgcctcctgagttcaagcaattctcctgcctcagcctccagggtagctgggactacaggtgcgtgccaccatgcctagctaattttttacatttttggtagagatggggttttaccatgttggccgggctggtctggaactcctgacctcaagtgatccacctgcctcagcctcccaaagtgttaggattacaggtgtgagccaccatgtccggccaagagggtgttcatttctgctccttgccaggtattgtgtcaggcactggggacccagcagtggctgagacagacagggctctgcctcacggagcccacattttcaccaggcaaaggatggtcggcccctaagctgggagataagacttcagcagttgggtgggggagccgtgggagaagcccagcccacagggggacagtgcaaatctagaaccaaggcgatggcaggggtgaggctggcacggtagctagagaccacgtcgtgccaagggccttggggaccatgggactatgggaccttagggaaggcgtctggaatgctgtagccagacactgttgcaaggaggatttttctgtagacatgaggccttccttatgaagaaagcaagggttctttcattcctgggggtgccaggtgctgtggactgcagcacgcgtggttgctgccgtcacagagctgtcatgcaggagggcagcgcgtccttgggaaggtggcaggcaggtcaggctaggaggaaagaggccgggaagctgagggcatttcctgcccgagatgcccaatgtagcctacttctgtccccagtggcttaaggcagagttgcctggtaggtgccctggtcccaccctggtgaaaggctgaaggtatttaattagtgcctgagaagcagagaggaaacaggatgtgccaaaacactttgatggatggtagagttaacaggctccttgcctgcagctgcttcagacaagagcgtccccaagccctgggcctgacctggaatgtggggatggaaggggagggggaggaaccaaggcactgggagggtaagtctctctctcccacatagacacacccactccttatgggtgcctgggcatctcctggtacctagaatctggcctgtttatctccacacccatccctggggtctacactaggccctgtgggtggcagttcacatcaggggagttctgactttggctctgagaggtggttcagagatggctgtaagttgagaagcacagactgctgggtgtggtggttcacgcctgtaatcccagcactttgggaggctgaggtgggggtggatcacctgaggtctggagttcaaaaccaacttggtcaacatggcgaaactccatctctactaaaaatgcaaaaattagccaggtgtggtggcaggtgcctataatcccagctacatgggaggctgaggcaggagaattgcttgaatctgggaggcgaagattgtagtgagccgagattagttcgcaccattgcatgccagcctgggcaacaagagtgaaactccgattcaaacaaaaaaaaaaaaaagctgggcatggtggagtgcctgtagtcctaactactcaggtgggaggattgcttgagtccaggaggttgaagttgcagtgggctataattacaccactgcactccagccagggccacagagtgagaccctgtctctaaagaaagaaaaaaaaaaacaacctcaggctccgagggcaccattactgctctatactgaagagctgtgcagcttttccagacccgaaatgtcatccacaaaacagaagtgataatggtcctgcctcacagacttcttgcagtagtccaggtgtttagaacggggtgtaaaaggccgtgtgcccttggtaggaatctttgcatatgcatttgatcatctgcagcctgcccagcccactgcttgccccctcctgggtgtgctgggaaggggtctttggccctccaggggttaggtgccccagcctccaaggtgccctcacgccttttcatcccgactcagatgctgacctgacctttgaccagacggcgtggggggacagtggtgtgtattactgctccgtggtctcagcccaggacctccaggggaacaatgaggcctacgcagagctcatcgtccttggtgagtgggcctgggaagggggaggcatggcccttccttttgtccgcttctgttctgtctgccctcccctgtgtccgccctctgccctccagcttaccctctgggctctgtcgcctgctctgctctcccccaggctctgccagtcacttaggctcccctgtgccctgcaccccaggcagggaccactggcccacagtgcctccaatcacccaagccaaactaagagaagagtggagacaattggagactctgccttttcaaagtctcatttttaaaaaaaatccagacttggggtccgggtgcggtagttcatgcctgtaatcccagcactttgggaggccgaggcgggtggatcacttgaggccaggagttcgagactagcctggccaacgtggcaaaatcccgtctctataaaaaatataaaagccaggcgtggtggtgcacatgcctgtaatcccagttactcagaaggctgaggcatgaggattgcttgaacctgggaggcagaggatgcagtaagccaagatcaagccactgcactccagcctgggcgacagagtgagactctgtccaaaaaaaaaaaaaatccagacgtggtcagagtccatgggcagtgaatgaggacagttgatggtgtgcaaaatcgacccacctcttgctacatccccaaggcctcatctcacccgagtccctcgccaaagcacagcggttttgccgtgtgccctgctgggatggcgctgcatggcacacacactgtgtaagtttgagtgcagctgaaacgaagccgattccagacacccaggggcagggcggggtgtccgtgtggctgggaggcctccttgtgttagggggatgttgccatcggccaggtgccctgctgtaagccaacacatggagtcttgtatgacatgtgctctgcatgagtgatgccgctgggctgtacactgccatcttcacatgtgtgaatgagcacgtgactggggggtacttgggctgcaagacagagttcatgtgtgggggatggaacacgtgcaccagtgacccaggaacctctgcctgttcttcggtaaaatgcaccatttgcatcagcagttcccaaaattagtctccaggtctatttacactctaaaacattatcgagggtctccaagagcttttgtttgtttctgtgggttttatgtctatctgttgcttaacatattaggaattaaaatggggagattttccttttttttttttttttttgagatggagtctcgttctgtcgcccaggctggagtgcagtggctcgatctcggctcactgcaagcttcacctcctgggttcacgccattctcctgcctcagcctcccaggtagctgggactacaggcacccgccaccacacccggctaattttttttgtatttttagtagagactgggtttcaccatgttagccaggatggtctcgatctcctgacctcgtgatccacccacctgggcctcccaaagtgctgggattacaggcatgagccactgcccggccttaaaatggggagatttttcaagcccaagatacacaaggaagactgggcaacatggcaagaccctgactctacaaaaaattttaaaattaaccaggcatggtggcatgcacctgtgagcccagcttcttgggaggctgaggcaggagtatcgcttgcacccaggaggtcaaggctgcagtgagccgtgactatgctactgcactctagcatgagtgacagagaccctggctcaagaaacacaaacacacacacacacacacacacgcatatagtccattaggcatcagggcgatgatggcatcagggagcctgggaaactctactggacattcatgggagaacaagtgaaaaaggcaaataacatcttagtgttattctaaaatttcttcttttggccttgtggacaggaccacgctttgagagctgtgactgacatgcctctgtcctgttgcgagggcctatagtgccaagtgcatgagctctggggagggcttcgtgggtgcagagctgggcctgtggaggcccctcagacacaacactggtggggctcagagctccaggggcactcgagggaagacaagaaccggctctgagatgcgtgaatgtgacagtgcatgagtagagatggagaccttgtgggtcccagaaccaggactgcatatgactttcatatgtgggtatttttgccttcatgggtcccttcctgttttaaaaaaaatgtgtgattatgttgtcacaaagagtttattcctgtatattgtgttaatttgtgttcagatttgtaaagtaaaattaaaccatttcagccaggtgtggtgacacatgcctgtagccctagctacttaccccagaggctgaggtgggaggatcgcctgagcccacgaggttgaagctgcagtgagccatgatcacacccctgcactccagactgggcgacagagctgagatcctatttcgtgggccctaggtccctgtgcctgctggaacaggacatccctatcaccgtggttggagccctttggggtgctaagacctatgaatgagggaaacttagggtgcccaagctgaggtagagccctcagaaccccctgggatttgtattggagccctcgtggcataacacaggtggattatgcaatgggagtttcttacctataagcacccacatgtgggcgggtggagggtaggagccatgcactagggcttcagcccccagccccttcccgcttcagggcacaccttgcacttggccagcctggagctgggctttcgggggtggcacagcctgggctggctctggccagcataatctgtttctcttttgtccctccagggaggacctcaggggtggctgagctcttacctggttttcaggcggggcccatagaaggtacggggggtggatcctgagttgggcttctcgggagctcccatacatcacctactgcttctgactctagttagtatccccttccccactaaaccctgctcactgtggacccctcactaacctggcctgactgtggctctgaggcatctagtggtctggcgctgggcctaggctaggctgggctgaggagagcctggggtgcaggccagggctctgtgactggcacctgcggtgctcttgagggtgtggcgtctgggcagctggctctctctttggtctgggggctgcagtctgtctccctctgtgcaggctgcctcgttttctgccttgtgttttttgcacctgggggagggccgtaactggggaatggccgggatggtagaatggggagtgtgctgtgcccagcctctggcacaaaaaatccagccagggctgcaggttccttggtgagctttgcaaatcgtccccgacctcagtgctggctccgcaccatgtacccctgctgtgccgttagccctgttccctcccaggcctccgggctcagggcctgttgtctttctgcagactggctcttcgtggttgtggtatgcctggctgccttcctcatcttcctcctcctgggcatctgctggtgccagtgctgcccgcacacttgctgctgctacgtcaggtgcccctgctgcccagacaagtgctgctgccccgaggcccgtaagtgtcccgctcatggccaccctggtttgggcaacatcctgcatccaagggaaggaggtggccatccacctgcccccaggacagtggcgttggtctggagggtgtgaatttagccagtggggagaaagtaggctgaggagggtctgctgtttagattgtcgtttacttcctccaacttttagtttatttttatttatgttgttcttttcttttgtaagtataatccatacacatggtaaaaatgtccaacagtacaagatactagtcacatggaagtaaagccctctaaaaaaaccaaatcttggctaggcgcagtgattacgcctgtaatcccagcactttgggaggccaagacgagtggatcacttgaggtcaggagttccagatcagcctggccaacatggtaaaacccagttctctactaaaaatacaaaaattagctgggcatggtggtgatcgcctgtaatcccagctactcaggagactgaggcatgagaatcgcttaaacccaagaagtggaggttgcagtgagctgagatcacgccactgcactccagcctgggcgacagagtgagactctgtctcaaaaaaaaaagaaaaaaaaatgttaagtgaaaaagttaagaaaccaaacaaggtttacaacactacatgatttaagcaaaaaaaattttttttgttttagagaaagggtctcattctgtcatccaggcagtgcagtgcgatcatagctctctgcagcctcaaactcccgggttcaagcagtcctcccgcctcagcctctggagcagctgggactgtaggcacacaccaccatgcccagctaattttttgatttttgttttttgtagagacggggtctcagtatgttgcccagcctgatctcaaactcctggcctcaggtgatcctcccaagtcagcctccccaaagtgctgggattacaggcatgtgccaccatgctggccaatttttaaaaattttctgtagagacagggtcttgctatgttgcccaggctggtcttgaactcttgacctcaagtgatcctgcctcaggctcccaaagtgatgggattacaggcatgaactaccacacctggccttaaacttaagcaaatttttttttttttttggagacagtttcactctgtcgcccaggctggagtaaagtggcgtgatctctgctcactgcaacctccgccccccgggtttaagctattctcctgcctcagcctcccgagtagctgggatataggcgcctgccaccacgcctgactaatttttgtatttttagtagagacggggttttgccatgttggccaggctggtctcgaactcctgacctcaggcagtccgctcccccgcacccctaccttggcctcccaaagtgttaggactacaggtgtgagccaccatgcctggccaaatttaagcaaatgtttgaaaacacatacccacaggaatgctgcacattttacccagctactatgtctagggtcgtatctagcacaccagcatggctactgtggagagctgggactggatgtgagatgagagctaaaggggaagtaagcaaaccaagcaggggaaggtaagagaagacagaagacagagagagagggacctaactctatgagaggagtcagacatgtgcaattgaaaaagacttgctcctgtctctcttctgtgaatgtttgtgaatatcccaacgggacactttcacagaggagctgattgacgtggtcacagccatcagccttgggacaccagaccacagtgtgtacactaagtggcactgatggacacttcagcatccctctagctgctgtcccgtttcccctcctcggggaccacagctgttgccagtccttggtttccttcaggagggtgtctgggtagaccagcctgtgtgcacacagtccaagatacatgaacagtgaagtgccaggcaatccttgcaagcatgggcaggtggagagctgaggcctgcttgacaccttcctgctcagaagcccagtgagcagtttccctccctagggctcagtgtcatcccctataaaatggggcttatggcagagctcaccacactgggtgcatctggggatttggcgagctcatgtgcacaccattgagcatggggcccaacctatataaaatattctacgtctgtcagctgctgggcactgccactatcagcctcagtagtgactgagggacagggcaccagtcagagccctggtgcacacagagtgaccccagagaagcagccttccctctctgagtcctgtttccttctgttaggtcctgacttcatgggttgttgttagcattaaggaagtcgctggctaattttatagtcattgaagtcagtggtgtgcaacctggttcctcaaaggatcacttccctgaaaaaattccactgctccctggaggcttatgcaggccatcccatcccctccctcttgttgtgttcagctgacagctttttgctcagtgagtaagtgttaggtccatttcacagatgggctgcaaccaagtttgcagtgaacccactaagaccagagctagggccaggactaaatgctggtcccaatgccacattcccctgtccccacaccacatttcctccatccggagaccctgttaccccaacccagggccccattaactccctggcagaggccctgttacatctgctgctgccacagcctccgcccacccttcaggaggcagcaggtcccactgctgatgataaagttgcaggctgcctgagctaatgaaggggcttcctctaggctgtgcacttagtcttctgcttccaaaccaaatcagaggtgaggcaccctctctgggcccatctctctcctccattttcctgttggggtcccagggaggaagccacttgcctagggcccaggaattttgcaagcctcttgccctagggaggaaggaagggaggaggatcttaccttgaactgtcaagcctagagcctggtggggcaggcagaaatgggtgcagtccatgagttagaaacactagaggagacactttgctgcttggccggggcaggcaagttaattcccgaggctcctgccactgcatctcaatctggaaggtgaccaggtgggcaggacccacgtctcccagatgactcattttttctagaacaggggcttggctgccaaagaggatacttgatttcggcttgtggggacagtggtggacccagcatctgggctttatataaagggcagctttgttgccctgtaaacacacagaccatgggtggccacttcttccagtaagttagctggggagttggaagtttaggtaaaaccttttgattgacaaatgttggcgaattaccatgctgttaaatgaaacattgttctgccaccctggggctgtgggtgcctgcgtgcaccctctgaaaaatcacacaggaagtggggtggggtctctgtgaagctggtgtcccccagcctcagggatgctgcagaaatggaatgaggaccaacagggactcagatgtccaaggaagctctacagcggagaggacggcttgggaaggaggtccaggcccaggtccctccggaacccaatgggtatggggcagcctggctcctgcctcatcccccttctcctgttgattgtgtcctcacagtgtatgccgccggcaaagcagccacctcaggtgttcccagcatttatgcccccagcacctatgcccacctgtctcccgccaagaccccacccccaccagctatgattcccatgggccctgcctacaacgggtaccctggaggataccctggagacgttgacaggagtagctcaggtgaggccgggggaagcaggaacagctggtgggagtgtgctgggcatctggacactgaggggcaggggctggaaggaagagtgtcttgggagccgaggaggggctctgctcctggtgcgcggccactgacagccactctcccccagctggtggccaaggctcctatgtacccctgcttcgggacacggacagcagtgtggcctctggtgagaatccatcgtcccgaagttggatgtgcctgtaagggagaggggtgggccaggatccatcctcccaaaccgaccaccacccccctgtccctagaagtccgcagtggctacaggattcaggccagccagcaggacgactccatgcgggtcctgtactacatggagaaggagctggccaacttcgacccttctcgacctggcccccccagtggccgtgtggagcggggtaagcaggagccttggggtctgagggcttttaaggtgggggggtgaaacatgtctccctgatacctgccgcagggactcttggtgcaaaccctggaccccgggctcctccagcagtcagtgacaccccccttccctgcagccatgagtgaagtcacctccctccacgaggacgactggcgatctcggccttcccggggccctgccctcaccccgatccgggatgaggagtggggtggccactccccccggagtcccaggggatgggaccaggagcccgccagggagcaggcaggcgggggctggcgggccaggcggccccgggcccgctccgtggacgccctggacgacctcaccccgccgagcaccgccgagtcagggagcaggtctcccacgagtaatggtgggagaagccgggcctacatgcccccgcggagccgcagccgggacgacctctatgaccaagacgactcgagggacttcccacgctcccgggacccccactacgacgacttcaggtctcgggagcgccctcctgccgaccccaggtcccaccaccaccgtacccgggaccctcgggacaacggctccaggtccggggacctcccctatgatgggcggctactggaggaggctgtgaggaagaaggggtcggaggagaggaggagaccccacaaggaggaggaggaagaggcctactacccgcccgcgccgcccccgtactcggagaccgactcgcaggcgtcccgagagcgcaggctcaagaaggtgagggccgccctccctggcgtccagaccgtccctgggcccccagccggtccccgcggctcatacccttctttctttctcccttgcagaacttggccctgagtcgggaaagtttagtcgtctgatctgacgttttctacgtagcttttgtatttttttttttaatttgaaggaacactgatgaagccctgccatacccctcccgagtctaataaaacgtataatcacaagctctggagagaaccatttgttcggccgcgcggggcgggggaccggggctgctcccgtatgcgtctgtaaagcgccgcgtcccgggggcaccggagtccggggccgggaggaagagacccagcctggcccggcccgcgcccgcgccgccggccggagaacgtgccccgcgcagccgccgcccgcctgcgtgcgcgccccggccccgcccaggcgtgcgcatgcgccccggccctccgccttcgcgcaccgcaggctggccgtccgggacgcgcgcgcgctcctctccccttccagcccatcccccccagccccccaccgacctactttactgtctccaaactcgggcagcccacctggcccccgacgaccccagcccctgcaccgggtaccccgacgttccatccagacccgcgtttcaccagggcggcgcgcggcgacctcgcgccccgcggagccccgggctcgcgcgcgcccgcccgcccccggagacagaccagcgcgcgcgccccgggccgcctccccccagcgcgcgtccgccccggggctcgcgccgccgccgccgccgccgccgcgcgcgcgcagctcaagtaaaggaggaaaaaaaaaagggggaaaaatagaaagcggcggcggctgcagcagcgatccgccgccggactgggccaagccgggcggcggccgcgcgagccggcgatccagggcactggcggcggccagccagggcgggccgtgttcaaaaaaaaaagtcgcggcggcggcggctgctcagggaaggaggcctgagggccgcgtgcagcgggcgggcagctgggtgggctgggggcggccgcgcggcgtcccggagcctcgggccgcccggagccggcgggcgggcggaggcggaggcggcggcggctgcagcggctgcaggagcggcggcggctgcggcggcggcggcggcatctcctcctcacatgaccccactgtttgtccccgtgatcagcgcgagcggctcccgtatctcctccgtcccctcctgccgcgcggcgtgagcgccgggctcggggcccccccggccgcccgccccctcccctccctccctcccctcccctcccctcccccccgggccccgcgccccccccgcccccgccccccccatggacatgctggacccgggtctggatcccgctgcctcggccaccgctgctgccgccgccaggtaagatccccggcccggccgtgcccccgcgccccggccccggccccggccccgcggcctgcaggccggggccgccatgatcccgagcggccgcgggcccggctcaaaatggaggccgccggcgcgggggggacctggcgcctcccgcccccggcccccggcctcggcggcgcccccggcctcaggcgcggccgggtgggactggggccctgcagctgggcgcgggggcgggggcgcgggcgcgggccgcgctgaccctgctccctcctgtgcccctggcagccacgacaagggacccgaggcggaggagggcgtcgagctgcaggaaggtgagtgcttgccgggccggccgcgcccggggagggctgggggcgctcggcgcggccctgaccgtgccccgaccctcctcggccccaggcggggacggcccaggagcggaggagcagacagcggtggccatcaccagcgtccagcaggcggcgttcggcgaccacaacatccagtaccagttccgcacagagacaaatggaggacaggtgagcggcgggccgcgagggcgaacgggcgggcgggcgggcgcgccgggaaggctcggacctggccccagcgccggcctcgccgctctgccgccccctgcaggtgacataccgcgtagtccaggtgactgatggtcagctggacggccagggcgacacagctggcgccgtcagcgtcgtgtccaccgctgccttcgcgggggggcagcaggctgtgacccaggtgggtgtggacggggcagcccagcgcccgggccccgccgctgcctctgtgcccccaggtcctgcagcgcccttcccgctggtaggtgccctgccacccctgggtgggggggggagggagtggagaggggacactggctctgctcttggggagccccgggggtggggcaggtgtcgcccagcggatgctgccttcaggcctcaggctgcatggggccagatccctgttgtgcaccgtgaaacctggggacagtgctcttggaatttttttttcccgcaaaatgggaatgatgtgtcttaagaggaaagtttcttagagtgcgaaacggatttgctcagcaagtgatcgctgacctcccgccatgttccagggctgtttgaaacacaggacagaatgctacacgcagaaggagtccccactcctgttaattgcagagaatgcagtaaaccccaagcacagcaatgaggggacgggatggaggaacagagaaagctaagggtagcctctgccctcctactccccaggctgtgatccaaaatcccttcagcaatggtggcagtccggcggccgaggctgtcagcggggaggcacgatttgcctatttcccagcgtccagtgtgggagatactacggctgtgtccgtacagaccacagaccagagcttgcaggctggaggtgaggagtagaagtcagattggcaggtgggggaggcaacgggcccagcagggagggaagcccccccagccagttctgacttcaccctgccttgccactaaccccccactctccctgcaggccagttctacgtcatgatgacgccccaggatgtgcttcagacaggaacacagaggacgatcgccccccggacacacccttactctccgtatgtgcaggggacacctggagggcctggtgttgaaatggaaggaagaggggtttctggagtagaagctgggcagttagcatgaagtgggcacatggtgtaatgttttttttctttgcctgtttctgctgctctagtgcacataaagtatcatgtcttttgtttttgcagatggatttaccttgcaaagataattttcaaatctaatacttagcagatgcttgggcaaacagctctgcgataatacatgccccctttttttttcctcctcttgtagaaaaattgatggaaccagaacaccccgagatgagaggagaagagcccagcacaacgaaggtgaggacaaggtgtggctccgggtccccctgaccaccaccctcacaggctcagccagccctggagtgtggagtgacagagagagaagccactcctgggcaggccacaagtgctccagagggctttgctggacgctgtaaaggtagaaagtgagcaacgaggggagagtacagtgtcagaagtagagggacagggagtgtgaattggaactggccatttgttgacccggctggtgatcttgaattcatggcccacatctaagatggtggacttcacactcccatacggattgcctgccccacttgaaaaatggggctgaccgggctcacgtgggctgacctttccacgtggcagctgtcatgctcacatcccgcactcccatgcctgcctggcctccagaagtaggtctgttcccccagggagcacatctgagggagaaactgcatgaagttctgcctctggctacctaaggccggagcatcctgccctttccagaaacaccaggtctcacctcaggtcatttggccttcagcactgtcccgccccgcctgtcagtagccactgcagtgggcacagcactgtgcaagtgccaggagagtgcttacacccaaacaaccatcattcaacaaatatttactgcccgtgggttctgggctgagcggcacaggccctgtgccaggtctggagtctggcctggagcgtcagggaggctcaaaggcctgagggcttatgtctcatgggtctcatgggacattgatggggggtgggctggggtgacgcttccctagggagaggggagtgtgggtcaggttactttgtggggtgctggtttggttgtgggagaagttccatttagaatgcctcaggagggaagatcgggaaggcctcgaatgcccgagtgaggggctgaatgctgagtcctaaaggtggtgatgggactggggtctgtggcccaggtagttgtgttctgagcagctcctccctgagttcaggcgttcattcagcgcgtgcatactacgaccagccccccttttgcgtcctcagatatggcaatgcagcagatgataggacagacaaggtctcagctctctgtgcgcgttctggtgggagagatgggagtcacacagccgcatcaggcagtgcaggcagtcacaggcaggagaggaaagctggggaagaaggtggcgggtgatggcggcatggtagtgtgctctgaagggctcttcgagaggtgacattgaagcagatccctgaagcgacctgagggaaggggcctgttgagaacctcaggagagtcccgggcagagggaagagctagaacacaggccaggccctgagccagggccgccatggtgtgtctgcagaagagcagaattcaggaaaggaaagaggaagttggcgcagtggagggggctgcccaggccagatggtggaggaccttggaagaagtccccagtgtggctgtctgggctcctgtggttttattccagggtgatgagaagccagcagaggggtttgggttgtggaggctgttggcaagagtggtgggaaggggctgggaggtaggagaccatacgactgtcaggcctgagacagggcaggggttgggggaaatgtggggaggactccaaggctggagaataagggtttcgtgctgaactcccctccatgcttggaagggaaggggtgcatctgagcttggttttgagatgcagtgagtttgaggggcccccagagcagccccagccccacgacttacctgtggtggggcgtcagggtggttcttaatctccgtacctgtcttccctctgtgaaatggtggaagcacagccgccccgggcacctggtggggatgcagtgagtcttggtggccacacagtaaggcgaagagaggactcagaaccctcccaccccactctcacccccgcctctcccttagttaatctgactccaggcagccttgaaactttctcaccctgtgaagcagtcttcatcacctgcccacttctccagctccgtcctgtctccgctttcctgacttgcagagcatctgccccaatctgctcatcctcccagtaccctcagccatctggctcatggctctaccaaaacagctccacttccggtcacccgtggtgaccccattgccacatccactggcctcctttgctgtctgggctccaagcatctgatgctgcctgtttccctctgttcctttctggaatcttcctttctcctccatcctctctgattctcctgtgatctttgcctttcctaccccactgttaacagtgaaatttccagggctgtcccagttccaagtgagtagatgggggtgccggggaatctgtgttttccatcagctcttcaggtgatttgtcatagtggacaagcttgagaaactgctttggctgcgagtgtttctttttttttgagaagggggtctcactctgtcacccaggctggagtacagtggcacaatcacagctcactgcagccttgacctcccaggctcaagcgatcctcacacctcaggcttctgagtggctgggaccacaggcaggcgtcatcacatggggtaatttttttttatctgtagagtggaggtcttgctatgctgcccaggctcgtcttgaacttctggcctcaggcagtcctccggcctcggctacaggcctgagctgccacacccagtcttgctggtgtttcataaggtccggcccctcccgtcggcctcaggtgtatgacttgtgaggcccagcgatgggctcggaagctcttggtcagtatcccccaaactctgttcccccttgtaggtgttcctcttttttctttgctgcagaagagtgtgtgactcacaaaaagttgaggactgttccttgatgtcctcccaggcttcgcccaccacctggctcctggtaatgcaaggaactgtgtttccatccattcccttcctttcactgcaactccagccccacgttttgaactacctattcgagatttctgtctctggacatccctgtaatgcctcaaactcaactcgcccaaaagagaatgtgccatctcccgtctccaaaggctttcatgcaaccttcttctttgcagagcagcaaaagctacccctgtcacagctgcccaagccagaaactaagaccagagccgctttcaactctgccctcttcttcccttatggccacaaaccccaagtttctcttctgtggtgatttcagatccgcttctctcacttctttttccctccttcccaccacttcttggtactgcaggagcttatcccagagtcacagactcaaatgcctgcaggggcctgagggagggaggtgcacttggcatctcaggaaggggtgtgtggctgggtgtggtggctcccgcccggaatcccagcacttttgggattacattttggccaagacggacggatcacttgagcccaggagtttgagaccatcctaggcaatgtgacaaaaccctgtctctaccaaaaaaattaaaaattagccaggcctggtggtacatgcctgtaacagtcccagctacttgggaacctgtggtgggaagatggcttgagtccgggagacagaggttgcagtgagctgagattaccctccagcctgagcaacagacccagaccttgtgtcagaaaaagataggaaaggttgtggggggcccccagtgatctggggcatgtgtgcgctgcctgaagggtggcccttgcccagtgccttccccttgctgccctgtcagaatctagggccactgttgccagaaactctgagaagctagaaatcgagacttatgtgaaatctgatttttaggtgccagattagattgctttttccgtttcattgatttctactcttaatgttactaattcatgcttctactcacttggttttttgtttgtttgttgttttgttttgagatggaatctcgctctgtcacagtggcgcaatctcagcttactacaacctctgcctccccggttcaagtgattctcctgcctcagtctcccaagtagctgggactacaggtgcccgctgccacacctagctagtttttgtatttttggtagagacggggtttcaccatgttggccaggctggtctcgaactcctggcctcaggttatccacctgcctcagcctcccaaagtgctgggattacaggagtgagccactgcacccggccccttctactcactttggattcaatttgctaggtttcatgctttagcttccctggcacaccccaaccccagctttttaaggtaattctttttttttttttttttccaattttctactaaaatctttattttacaggattaatgtttcacagcagggattgagatgattcttaacctttctctttgcttaacaacatttagagttgccagttcactccagcatcactttagctacatcccactgggatatgttgtttttgttatcattcagtttaaagtgttttccaattttccttgtgatttcttctttgacctttctgttatttggaggcaggttgcttaatttccaaatatttgtgggtttttcagatatctttttgttattgatttttaatttagttctgttatggtcagagaacatactctgtatgatttcagttccttgaaattcgatgagacttacccgacgggcccgaatgtgtcctagcttggcggaagcttctggggcattgacgaggacaggtgtctgctgctgtcaggcagaatgtccccccaggtcagtgaggtcaggctggttgagtgttcaggctttctattctgatttttgttgttgttgtttacttgttccaccaatcaatgagaaagatgtccatgtctctcactatatttgtggatttgtccatttcttccttcagtcctggcaggtttcgcttctgaattttctcttttttttttttttttttttgagacagagtctcgctctgtcacccaagctggtgtgcaatgatgtggtctcggctcactacaacctccacctcttgggttcaagcaattctcgtgcttcagcctcccaagtcgctgggattataggcatgcactgctatgcctggctaatttttgcatttttagtagagccggggtttcgccatgttggccaggctggtctcaaactcctggcctcatgtgatccaccctcccaaagtgctgggattacaggcgtgagccaccccacccagcttctgaattttaagtttcctatggagtaactgaagtgcttctgtggaatgaacgtggccttggtcctaatgggtcttcctgtatttcaaatgtgccatgatggtcttccgaagccacaggctggacagcattaccgcctgctaatgtcagggcctggattcaagggcctgggactctggaggaggaggagatgcggtcctgacctgcgagcagagcacacaaggccttgacaaccgatctttacaaccttttcccacccctgcataccctgaaatggttttcaggccaccatttctgggatcttcccagctgcctgccttagagtctttctctcagaaaccagcccgaatgtttcctggatctctgaggattcatcccacccccattcccatgcagaggccatggctcggcgcctggcgttcccgaggcactttgtaccatcttcagtgatgacacgaatgcaatggggttagtgccacttgcccacagtggtgctgcgagtgcccatggggcgcaccggggctgcttccaccctggaccccagcctggcggagggcctggcacatagtagggcggggagtaggtgtgtaagaagtaagcttgctctggagaggatgtacctgcagccggcgcccagctctcgagaggactgtgggagggcagaggctgaaacgaggccgcctgccgagttcctccacagacccctgggcgaggagcgctctgctggggactgcgccagcggtgcctccaggcctggactctcagctccgctgctgcttttggccagagttcccaaaggcgggtgtggttgtctttggtgggaaggttcagcgcaccgcgatagtaataggggagcaagcactcgctgagcccagtgcagggcctggaccgtgctccatagcaagcactgatcttgggctattggttttggaggaaagagggagcacaaggatggaaggggccagggaagagaggtcacggtgggagaaggagagtccgcatccatcggagggtttgtcactcaggcctgagtgggaggcactggaggcagggagaggccagtcagcagcatgcggccacagcccagagaagccagaggggtttgctggtgggtgggccccagccttttcaagggaacggcaggtctggggagctgccgatctcggggtgtgagggtaacgggcaggctgtggcccacccctccttctcaggctcactggacccctgaccggtttcatcaccattatccaaggctttgaaaagaccccctggccttcctgccacatgtgccctagctatagggcttcgttcccctccacaaatggtgcagacagcatgagccaccctggcagggggctgggggtccgtggggtaggagttgggggtagctgagcgttctttcctgtccccacggtgcctggtgctggggcttggcagccagggttgggacagcctggctttagcaggtcctgagtcaggggtctcaggctccgcagcacacagtccccaggcaggtgtcaggatgggatgtggccagagaaaggcatgtgctctgtctggggatagctgccacccagctgacacagttggcatgagattgtggagttttatggagtaaaatcacaaatctgggttttttaagtaaaaccttctatgagttgccatctctggccttcaacataggatttgggtctttcctgggtgagctggtgctttgtgggccaggccctgggagctgcaagtaccagttgggatctgccattgccctgtggaaggattttaagcaggggtgaaacatggtcagacttggatttagagatgaggaaaaaaaacaaaatcacggtgccagagtctctggggagactggagaatgcagtgcaggggccgcaggagccaaaaaggggcactggtcctgcgaagagtggctctgtccatccctgccttccagtatgtgcccactgtgaccagagctccatttctcaaaagaagccagtgatgccaattaccatgagaaatttccttatttttaactgtcgattaaaatttgtacaagtatggtggggcaggcctgcaaaatgatctccaagtgcctggcctttgatgcccgtcctaaaagcatgtgtggcactggagggcccacgtttctttgttcctcttgagaagctggggtgggggccggctgggctcagggtgcggcccctcacttcccagggctgtggtctcggtggggcctgcactgttcctgggtgtccttgggctgagcctctgccctgtgaggacggccgctcaggcatgatccgtcagcgaagccgtggctgtgactctgttttccgcagtggagcggaggcggagggacaagatcaacaactggatcgtccagctttcgaaaatcattccagactgtaacgcagacaacagcaagacgggagcggtgagcaccccggaccctcagtgtctgcggtggtcccggcccccgacccttgcatgcagaaagtccaacagccatggggctcgggagtcatccctggggtggaggccggtgggcggtgcctgccctaaggctcctggtcccctcgccccccagagtaaaggagggatcctgtccaaggcctgcgattacatccgggagttgcgccagaccaaccagcgcatgcaggagaccttcaaagaggccgagcggctgcagatggacaacgagctcctgaggcagcaggtgggtgcggggcctggagcgggtcagggcccaggagccccagatgcaaggcgctggccctcagctcccttgacctccgtcgtgtccgccagatcgaggagctgaagaatgagaacgccctgcttcgagcccagctgcagcagcacaacctggagatggtgggcgagggcacccggcagtgacgcccgccaccaccacgcagccgccgccgcccacgccggcctctgctgcccccttccccagcccttagcacagagagggacacatgcccctcccccagctgcgtttttttatagtagatttttaacaaaaaacggggagaaataatgcatttctgtggatacagtgcccaccgccctcctccacttggaaacggtatcctccctgcccatccgtctgtctgtcgcccttctcccggccctcactaagccccggcacttctagtggtctcacctggaggcaagagggaggggacagaggccctgccacgtcccgctgcctcctgctctctggaggtactgagacagggtgctgatgggaaggaggggagcctttggggggccacccggggcctggacctatgcagggaggccacgtcccaccccacctcttgtttctgggtccctgctcccctttgggggtgtgtgtgtgtgttttaattttctttatggaaaaattgacaaaaaaaaaatagagagagaggtatttaactgcaataaactggccccatgtggcccccgccttgtctgcttgtgtgtttgtccatctcaggagtggggagggggcctggggtctgcagagctccacgaggcatggttctgctgttgtgcacatggctgtgcatggtccctgccagctgcaccacccattacccagtggttggttggatggatggaggaattaaggaatgaatgtcccctttgaggccctagacgtgcatgagggtgtggggagctggggtcaaggacatgtcccatgttggaggagaggcaggggtctccgtgtcaacagttcctgaaaacacaaccagcccctggccctgccctgctgggccaaagccctcccctctgcaccagccaatagtggggcctggccttgagcccctcacccccagggagggcagatggccagggcgccaagcttggcccgtcagcctgtcgccttgcaccaaggctctggcgcctgtgctgtgacccctgcccctgctgatgatgaaacctgtcctcagctgagatgcagcgatgcctggtagggctgggggctgctcctgtgtctccccaggtgagcacacccctattcactgggccctgcttcagcctgcagcacccttcaactcccaggagctgggcttgccactctgctcaccttgtggagctccatctgcctttcctccccaattcccccactccctgcactcgtctcttcccacaagagccctgtctccttttcctagctattcccatctgaggccatctttattcatttagtttttagagacagggtttcactctcacccaggctggggtgcagtggcacacaatcacggctcactgcagccttgaccaactacaggtgcgtagcaccacagccaagtttttgtatagatggggtctcgctttgttacccaggctgtgacaagaggagcctcccacgtggtgtggatgaggaggcagatggcagggcctgtgcatttctgtgcttgagtgggccttgaaagtggttcagcaaccaggaagaagtgttcattcctcgacaacaacatccccgggctctggtgacttggctgacactggatggccctggaatgaaaaaggcaaagaggcaaaatgtgcaagggcccatctggaaccaaggtttgttgatcccctgggccgtgtgcaccctgagctgggcctggtagtggaaaggaatgaaggcactgcagtcaggcagcctgggttcatcccccagctagtggtgtcctaaggaaccggctccccaaaaacatccctggcttgtagtgcttgccaatttctgggtgtcaagactcccactgctgctgatttcaggataccagcatgatgccactgaatgcagagtttcgagatgtgcatggtctgctatgttgagccaggtctagcataccgctgtgccctgctgtgttttaggggagatggggaaacctggtgggtaagagcaaaagccctggagtcaggctgtccaggctagaatctcagctctgcctctggctgagcaagcttgggccatgccctgatctctgccttcagtgccttttctgtaaagtgaaggaaatgagtgtccgacggggaggaggttcctaaaagggagcagggtctggggagcccaggcctctggggttgggtgactgagaaggcagcccctgaatacagagcagagctgaaggtggggcagtaagtgctgctgggagaacaggcagcacaggctgagttggtgcagaagtgagtcaacatatgtgccatcgtataaaatgtactcatcggactgtagatgttagctattactattactgctattttatgttttatagacagggtctcactctgtcacccaggctggagtgcagtcacacaatcatagctcactgcaacctcagcctcctgggcttaagcgatctgcctcagcctcccaagtagctgggactacagatgtgtgccaccacgcctggctaaatttgtttaaaattttttttgtagagatggggtctccctatgttgcccaggctagtcttgaacttctgggctcaagcgaccctcctgccttggcctcccaaattgctgggattacaggcataagccactgtgctgggccatattactgctgtcatttatggccaaaagtttgctcaaacattttccagttaccagagccacatctcaagggtctgacactgggaaaacaccacgtgcggatcgggcacacgctgatgcttgccctgctcagggctatctagtgttccctgccagaacctatgcacgtgtggtgagagcttaaagcaatggatgcttcccccaacatgccagacactcctgaggagcctggcggctgctggccatgccccgtgtgcatgtaggcgatggggaagtgagtggaggagagcggaaccttgattctgctcatcaaactgcttaaccgctgaagcaaaagggggaacttttttcccgatcagcagaatgacatcgtgatggggaaagggctccccagatggctggtgagcagtgtgtgtctgtgaccccgtctgccccaccccctgaacacacctctgccggctgagggtgacacaaccctgttccctgtcgctctgttcccgcttatctctcccgccttttcggcgccaccaccttcttggaaatgagacagagcaaaggggagggggctcagaccaccgcctcccctggcaggccccataaaagcgactgtcactcggtcccagacaccagagcaagctcaagacccagcagtgggacagccagacagacggcacgatggcactgagctcccagatctgggccgcttgcctcctgctcctcctcctcctcgccagcctgaccagtggctctgttttcccacaacaggtgagagcccagtggcctgggtccttagcagggcagcagggatgggagagccaggcctcagcctagggcactggagacacccgagcactgagcagagctcaggacgtctcaggagtactggcagctgaacaggaaccaggacaggcacggtggctcatgcctgtaatcccagcactttgggaggttgaggcaggcagcccacttgaggtcagtttgagaccagcctggccaacatggtaaaaccccgtctctactaaaaatacaaaagttagccaggcttggtggcaggtgcctgtaatcccagctactcgggagactgaggcaggagaattgcttgaacccgcaaggtggaggttgcacagtgagctgagattgcaccactgcactccagcctggcaacagagcaagactccatctccaaaaaagaacagaaatcaatgaagcaccgagtgacagggactggaaggtcctaattccatgggtatttacggaacccctacgccgtgtggagtcttattctagacagtggggacgaggccatgaacaaggtagatgagagaggagatttctccatcctggtcagggaatttgttaaagactgatgaaaacatgaataaataattgtgtctagtacattctattcgtgaatctcataacagacagtggtagagtgaccgtgacccattcgccacacagtagagtcacttttttggtttgttttttagagacagggtcttcctctgttgctgaggctggagtgcagtggtgcagtcatagttcactgcagcctcaacctcctgtgctcaagcaatcctcccacctcagcgtcccaagtagctgggacagcaggcacatgccacgggttgggggaccacaggcatggtcaaggggctggcagtcaagcaagtgtttcatgagaaagtgacagttgaccttcgtcttggagggtgagagatggaggcagcaaagacctaaggagaggacaagccagcatagcccagggtcaggctgaacaagaggagatggtgggacttggggataaggctgaggggtgggcagtccctaagtcttgtgggcaaccatgcagacactgatttttccttggaataaagaggaagcccccataagcttttttttttttttctgagatagggtctcgctctgtcgttcaggctggtgtgcagtggcatcatctgggctcactgcaacctccgcctcccgggttcaagcaattctcctgcctcagcttcccgagcagctgggattacaggcggctgccaccacgcccggctaatttttgtttttttagtagagacagggtttcaccatgttggccagactggtcttgaactcctgacctcaggtgattctcccacctcggcttcccaaagtgctgggattacaggcgtgagccactgcgcccagcctcctgtaggtttttaaaatggagaaaaccacaatctcactggccatgttttaaaaaacttaatctgccagtcaggcaccatggctcacacctgtaatcccagagttttgggaggccaaggtaggaagatcagttgagcccaggagttcaagaccagcttgggcaacacaaccagaccccacctctacaaaaaattaaaaaattagccgggtgtggtggcgtgcacctgctgtcccagctactcgggaagctgaggcgggagcatcgcttgagcacaggaggtcaaggctgcagggagctatgactgtgccactgcactctggcctgggcaacagaggaagactctgtctaaaaaacaaacaaaaaaagtgactctgctgtgtggcaaatggattgaggggcaagaatgcagggaggtgtgttaggaggctggcactggcatccaggcaggggaaggtgatatcccaaagaagagtagcagctgtggaaagaggaggaggcggatctgggaggtttttttttttaggaaaagccgcccatgggaaggtgagcagaagcaagaaagcaaggcccctcctaagagtccatttgagctctgggtttaaaccacttggagaggagcaggttgccgggagccagtctcagaggtccactgggccccctgccatcctctgcacccccttctgctttcacagacgggacaacttgcagagctgcaaccccaggacagagctggagccagggccagctggatggtgagcgcaacagtgatgcctttcctagccccctgctccctccccatgctaaggccggttccctgctcacattcccttccttcccacagcccatgttccagaggcgaaggaggcgagacacccacttccccatctgcattttctgctgcggctgctgtcatcgatcaaagtgtgggatgtgctgcaagacgtagaacctacctgccctgcccccgtcccctcccttccttatttattcctgctgccccagaacataggtcttggaataaaatggctggttcttttgttttccaaaccagagtgtctgttgtcctttctctctgccgagtgtctgtgctaagagcttgtcctgaccctgccttgcaagcaccagtgcttggtgggtcatgtggggctggtgtgtcctggaggttgccaggaaagttggtgaagaaaatttgtttctgttctcccccttcatgttgcaataataggggatgaaagttaatgtttcctctccttgagatcttcctaaaacagctgtagaaatcagtgcctgtaaggcaagcttgtccaacctggaggccacatgcagccctggatggctttgaatgcacccaacacaaatttgtagtttcttaaggcattatgagatttttccgcaatttttttttttctcatcagctgtcattagtgttagtgtgttttatgtgtggcccaagacaattcttccagtgtggcccagggaagccaaaacattggacactgctataaaggttctcaaagtaagatccagggactccttttgtagggctcctgaaggtggaaactactaagactttttttttcctttttttttccttttttttctttcttttttttttttttttgaggcagagtctctctgtgtcacccaggctggagggcagtggcatgatcttggctcactgcaacctccacctcccaggttcaagcgattcccctgcctcagcctcctgaatagctgggactacaggcacgtgccaccacacctggctaatttttgtatttttagtagaggtggggttttgccatgttgtccaggctggtctcgaactcctgacctcaagtgatccacccgtctcagtctcccaaagtgctgagattacaggtgtgagccaccacgcccggcctacaaagatgtttatttgcctttttcaccctggttctctcatgagtatacaatggagtttccaggaggctctgcgacacctgttggcatcatcaccagatggctaatggattgtgtgctggtgtatctcacgcttttaaatgtcccagtttctagcccggtgcagttgcaccagccctgctactcgggaggctgaggcaggaggataatttaagactgggagttccagaagaagacctggtgtcaaaaaaaaaaaaaatggggcaacgaaaatgagagcaatacagctttcaagaatgggaggggccaggggtggtgattcatgcctacagcactttgggtggctgaggcaggcagatcacttgaggtcaggagttcaagaccagcctggccaacatggtgaaacaccgtctctacaaaaattagccaggcatggtggcatgtgcctgtaatcccagctagtcaggaggctgagtcaggagaatcacttgaaccctggaggtggaggttacagtgagccaagacaacactgctgcactccagcctgggcgacggagtgagaccctgtctccagaaaaaaaaaaaaagaagaatgggcaggaactcagttccttgtggaggtgaactatattcctatatgtttcacgtgcaaagtgtgtccttcctgagagaatacaacttaagatgctcctgtgtaacaatcccccatacctcgctcatctgctatacctggatggcctctgaaggccatgggcctcacaccttttggtcttaggacccctttacattctgagaaattattgaggactccaaaaagctcttgataaagtgggctatatctctagttgcctgatgtattagaaactgaaactgggaaaatatttttactgtttatttatttatttttgagacagggtctcactctgtcgcccaggctggagtgcagtggcgcgatctcagctcactgcaaactccacctcccagtttcaagcggttctcctgccttggcctcctgagtagctggaactacaggcgcccgccaccatgcctggctaattttcatatttttagtagagacagggtttcaccgtgttggccaagctggtcttaaacgcctaacctcaagtgatccacccgcctcagccactcaaaatgctgtgattacaggtgggcctggcctgcccacatttgatagaaacagacataggggctgttatttcactgtcttcttagctcccaggaagcaacagctctcacttgatggtaaagggcattggtcattcggcctcaatgttgggtgtgggcagggagtgggaaggcccaggctgggcgggagagggctccaagacacggctgccacacccaaggcaggtaaacctgactagaacttctgattttgtcaagagaaggtgggaattcctatttttattagagatttcttgctttgacagtattggcaactgagcaaagcaatttgtcttttaacatcaacattctgtgagccaaacgaagcccagctgggcgccagatcagtctggggcaccatcaatgtctgccttcgctttggaatccacagaggcttgtcctctgggaggggaggtttcctgaatgaaaactgaagggatagggagaggggagttgtggtgagcttggcctcttattagctgtaacatcttgcatgcatcttcttcatatccggagctccacctcctcatctgtattttttattttatttttttagtctgggtcttgctccatagcccaggctgaagtgcagtggtgtgatcatggctcactgcagtcttgatctcccgggctcaagcgatcctcccacctctgcctcctgagtagctgggaccgcaggtgcctatcaccacgccccgctaaagttttgtattttgtgtagagacgtggatctggctgtgttgcccaggcgggtctcaaactcatggcttcaaatgatcctcccacttcagcctcccaaaatgctgggactacagttgtgagccaccatgcctggcctctccttacctttaaaagaacagaggcactgggcgtggtggctcacgctgtaatcccagcactttgggaggccaaggcgggtggatcacctgaggtcaggagtttgagaccagcctgaccaacatggtgaaaccccgtctctactgaaaatacaaaaattagccaggcgtgttggcgcacacctataatctcagctactctggaggctgaggcaggagaatcgcttgaacccaggaagcagaggttgcagtgaaccaagatcatgccactgcactccagcctgggtgacagaacaagactccatctcaaaaaaaaaaaaaaaaaacaaaaaaggaacagaagctaagtccatacaggacttagcttaactggctctagagctgctcaaccaagggaatgagtgtgaaattgctttggaaactgtccaatgcttcctcaatgtaaaggattcatattgacaggagagggtagaggcctccctcctggcaggtgggaaacctgaaatcaggaattacacttaatgacacggggtgctcttctctcctgagcaagcagttctctggggtggtcctagagagatgggagaacatgtaaagcagagatactcaaatttcagcgtgctcaaaatctcctggagggcctgcaaaaatgcagatgggtccaggctcagtggctcaagcctgtaatcccagcactttaggaagctgaggctggaggatcacttgaagccaggagttcgagaccagcctggccaacatggtgaaagcccgtctctactaaaaatacaaaaattagctgggtgtggtggtgcacacgtgtagtcccagctactcgggaggttgaggcacgagaattgcttgaacctgggaggcagaagctgaggtgagctgagaccttgccactgcactctagcctgggtgacagaatgagactctgtctcaaaaaaaattaaataaataaaaataaaatgcagatgaggctgggcgtggtggagcatgcctataatcccagtggtttacgaggctgagacgggaggattacttgaggccaggaattcaaggctgcagtgacctatgatggcaccactgcactgcagcctgggtgacacagtgagacgatgtctgtaaaacaaataaacaaataaactgcagatagctgggcctccagaatttctgattccacaggtgcaaggcggggcccttgaccttgcattttgagcaagctgcagtcctgtggaggactggttgtgaagctgacaccattgtctgagggcagcaaaggctcttggatggattgagcctcagctcccatctatgagagctttaagctttaagtgagagctccccatggccgagagcttcattctgaattcctgctgctaggaattcaaaactcacattgaagtcctaacgcctagtagctcagaatgtgaccttagttggaggcagggtcttcacagaggtaatcaagttaaaatgagacgggagaatcctaatccaatataactggtttcctaaatctgacagggtacagtgactcacacctgtaatcccagcagtttgggaggccaacacaggaggactgcttgagatcaggaattcaagaccagcctgggcaatatagtgagaccctgtctctagcaaaaaaaaaaaaaaaaaaaaaagtgccagtagtcccagttactattgagaggctgaagcaagagagtcgcttgaatctggagggtggaggtggcagtaaggtatgattgcaccactgcattccagcctaaatgacaaagcaatactatgtctcaaacataaataaataaataaataaataaataaataaataaataaacggcaaatctgggcaggggtgaatacagggggaagggaatgtgaagatgaagatgccatacagagaaaggcccggaacagatcctcacacccctcagaaggaaccaacactgccagcacttgatcttgttgatcttggaattcaagctcaattctggcagggttttttgtttgtttgtttgtttgtttgtttgagtcggagtcttgctctgttgcccagcctggagtgcagtggcgcaatctccgctcactgccagccccgcctcccgggttcacgccattctcctgcctcagcctcctgagtagctgggactacaggcgcctgccaccatgcccggctaattttttgtatttttagtagagacagggtttcaccgtgttagccatgatggtctcgatctcctgacctcgtgatctgcccgccttggcctcccaaagcactgggagtacaggtgtgagccaccgtgcatggcctcaattccggtttttaagccacccagtttgtgaaactttgttgtaacagccctggaaaactgatacacctgctctctcgtaaaagatcagctgatacggcagcaccggccactggatctgcgggtcagttgtccccttagacagggcacctgcccgccagtcacaggtcctgtcacccagccccttcctctcatgggctccagccgcctcgctcccacaggtctcctggagacccgagttgctgatgtcagcgactattgcgagtgctcctgtgggacactgtcctctccccagcaacagccttcagttcacacccagggaggagatggagccccacactgcaccagcacacgactccagctccaactaggtgggtgttgatgctgaaggctgtgacatgcaaataccccccaggatctccttgtcaccccgaccaccaccaccaaagcccaggcaccaggcccctctcttctccaggacccaggcattcaagccccgcccgactctcaatggtcctttgtcccggactgggaaaggcacgggcagagtctgacatcatgaagcctggggtgggggtgggactccccctccccctccaactcccccccagccccacaacgcttctctccctggtctgagggatttccccgcccctcaccccctgggttctcccttgagagcgaggaccccccctccccactgctctggcctgaaggaggacaggagatgtcccagtgaggctgaacagctcatggtgaaatcactgctgcactttgtcacgccacctccagctgccccgagcccccacccaccttgcaaaagtcatgaccaaggggtggaatctgcactcagagggtccttgcccaacttggtcagcacagtcctatgtgcaccaagcactgccccggggacagaagggtgcacatgacagacagagaggcagataggtttctggtgagcccctgcctctgagagctcctgggttagtgggaggcagaggcgggcagacctagggtgcacacgggccagcctgccaaggctacagaaggaaaggacagcattgcaatggaggggcctggctgatgggcgaagatgggaaagcttcccagggaagcggcacccaggctgctgagcctacaggatgggtgaacggcagccagtgccagagtggggagtgctatggggtggggactgctttccaggaagaatgagcagcaggtgcacaggccttgagtctgaaggtgccctggggctctggggaacacattcaaccacccacactgtttattaagctcaactgcctgccaggagcttgtctacgagcaaggatggattgagaatatccaagacgaagcttctggcctggtggaggtcacgttctcatgaaaggagttggtgaacacggaaggtcatttcagatggcaagaggaggtgacactgacgttgagggtggaaaggacctgtctcctcctgctgcccacctaatgttgccaccaagattccctgaggacaatgcctctgtccctcagcctgggacttccaaagagattagactgcccccccacccccgggacccagaatcagggtgtacagggatggaagatggggagagagcaaggcagccactcccgacccctccaggaaagagctaggagaacccaggcgtcaggctgcccagtccgagccccgtggtgacaagggcccctttgtgcccccctcccccgggggtagggaggagctgggccctggaggcaggcggcccctggcacccagggggaggggaggggctggcaagtgggggcctagaccctggaaggcaggggactgcgagctgggctggcggagcagaggtgcagaagcaactgagtccaagtgagtatggtggcagggaggccagggcaaggggagcagggcaccggggcagtggcacccagacgtgagcagggtcaggtgctctgggtgagggagcatcgctgtgcaccgctactgatttaggatgcaggagtgtgtggcttggggctgctttggggatgggctcggaccatcgctggggcagcgatggggctctgggaagaaaccacagagagaaaaaacaaagggccccccctcagcaccccttgtgggtgaagattttgcaggagaggtttccttggggttcccgagtgcggggcagatggggtggaggaggtctgcatctggccgaagaatggaaggatgtccaggtgatcagacacctgcaggctgcaatctgggaggtggatgggggcagtgggctgttagtgactgcattctagcacctgggcacatagcaggtgtgtgtgtgtgtgtgtgtgcgtgtgcgtgcacacacatggctgcccatgcaccttcctctgtaagcctcagtcgacttttcttcattaatccccactaaggacactttttatttttcgttacttttttttttttaagagacgggactctcactatattgcccaggctggtctcaaacttctgggcacaagagattctcccaacttggccttccaaagtgctgggtttacaggcgtgagccactgcgcccggccccaactacagaaactttttagatgcatttgtcctcatcccatccttcccttggcattttaatccaacagatc

SEQ ID NO: 6262 - DNA, 303 bp, Homo sapiens; identical to SEQ ID NO: 1075
  misc_feature (1)..(303): n=a,t,g or c

SEQ ID NO: 6263 - DNA, 466 bp, Homo sapiens; identical to SEQ ID NO: 5622
  misc_feature (1)..(466): n=a,t,g or c

SEQ ID NO: 6264 - DNA, 18596 bp, Homo sapiens; identical to SEQ ID NO: 1191

SEQ ID NO: 6265 - DNA, 1301 bp, Homo sapiens; identical to SEQ ID NO: 2017

SEQ ID NO: 6266 - DNA, 836 bp, Homo sapiens; identical to SEQ ID NO: 970

SEQ ID NO: 6267 - DNA, 182 bp, Homo sapiens; identical to SEQ ID NO: 1362
  misc_feature (1)..(182): n=a,t,g or c

SEQ ID NO: 6268 - DNA, 2620 bp, Homo sapiens
catcgggggatgatctggaaagcgcgatcagtgaagcggacgaacggcaggataaggcgggtctagtgacaggaatgggccgatgaagctctgtagggatggtgggtaggccgatcgggccgtgtccccggcctcccgatccgacggaatttggaaatcccggggctattcatacattgagcttttaggagcggaggagaaaagccaccaccctgacgatcccggctctcgctccaccttcactcaggtggcccggcagcggaagtgacgaacgcggaagtggtttttctgttgccgaggggacgggccgggcagatgccaacatggcagcggttggggctggtggttccaccgcggcgcccgggccaggggcggtttccgcgggtgcattggagccggggaccgccagtgcggctcacaggcgcctgaagtacatatccctagctgtgctggtggtccagaatgcctccctcatcctcagcatccgctacgcccgcacgttgccaggggaccgcttctttgccaccactgctgtggtcatggcggaagtgctcaaaggtctcacctgcctgctgctgctcttcgcacagaagaggggtaacgtgaagcacctggttctcttcctccatgaggctgtcctggtgcagtatgtggacacgctcaagctcgcagtgccctctctcatctacaccttgcagaataacctccagtatgttgccatctctaacctaccagctgccactttccaggtgacataccagctgaagatcctgaccacagcgctgttctccgtgctcatgctgaatcgcagcctttcccggctgcagtgggcctccctgctgctcctcttcactggcgtcgccattgtccaggcacagcaagccggtgggggaggcccacggccactggatcagaaccctggggcaggcctggcagccgtcgtggcctcctgtctctcctccggcttcgcaggtgtctactttgagaagatcctcaaaggcagctcaggctccgtgtggctgcgcaacctgcaactgggcctcttcggcacagcactgggcctggtggggctctggtgggctgagggtaccgccgtggccacccgtggtttcttttttgggtacacacctgctgtctggggcgtggtgctcaaccaggccttcggcgggctactggtggctgtggttgtcaagtacgctgacaatatcctcaagggctttgccacctccctgtccattgtgctgtccactgttgcctccattcgcctctttggcttccacgtggacccattatttgcccttggcgctggactcgtcattggtgctgtctacctctacagccttccccgaggtgcagccaaagccatagcctctgcctctgcctccgcctccgggccctgcgttcaccagcagcctcccgggcagccaccaccaccgcagctgtcttcccaccgtggagacctcatcacggagccctttctgccaaagtcagtgctggtgaagtgagggctggcagcaatggggggacacaagggagggggactggggtggagggtgttgggcatctgcaggacccaagtcgccaccctccggggcctggctcctctgggtttgggagatggtcttttctcccaggtcactgagacttctggaggggtgtgggactagagctgggtgtcacgtgaacccttcctggtagggtgacccccttcccctggagggggttttagagctgccgcctctgctccctctaacctctttggaggcagggttgggggtattgtcattcaaggccttttttttgtctgctccctccccgaccctgtgccctcttctggaggtttctcgtctgggagagtccctcccagcagtccctccacctccataaggacacactggacaaaactcccgcagctcttcaggaatgaccgatgcctacctgtggggttcagttgcccatagtttgaggccttctctcctcccttaccaccgctctggatcatgttactagttccgtcttttgtgtggccttgggccagcttccttgataccttgaagatgggcttcttgtgagtccccagggagaaagggacaagagctaagatttttgcatcagcccttctggcagaaggtgtggtaggggccatttgttttttttagtggacttgggatttgtggtgtaatcatatcattaatgatccagggtgtgggaaaaatggaggtccttgaagtggctgaatctcattgtatttaagacactgtcagttgccagatgtaggcttatttttggagatgtctaggagaggaaaaagctaccaatcatactcttgatatccgtctggctgtgtgaggcacccctacctcatgggggtgtcttgggattgatgaactgtggaacctgcctcctgcgctccccaaagcttattaaccccttaactgtatcggggcggggtgtgtgtgtgcatggaagatgcctgggctgtctttgctatatgtaaatagagccattggatctttatttttgattaatttgttctgattttttggtttgttttttaaggaactgtaatgaacaaatgtcaggatatccaatgccaaataaagatgttgtatttatttag

SEQ ID NO: 6269 - DNA, 2103 bp, Homo sapiens; identical to SEQ ID NO: 2414

SEQ ID NO: 6270 - DNA, 267 bp, Homo sapiens; identical to SEQ ID NO: 5666
  misc_feature (1)..(267): n=a,t,g or c

SEQ ID NO: 6271 - DNA, 410 bp, Homo sapiens; identical to SEQ ID NO: 1396
  misc_feature (1)..(410): n=a,t,g or c

SEQ ID NO: 6272 - DNA, 459 bp, Homo sapiens
  misc_feature (1)..(459): n=a,t,g or c
tttttttttttttttggcttttaaagcatttaataagtcaaaatcaaataaaagtgatttttaaaaagaataaatttacatatggtacataagcaagacagctgaaggtttctaaaatagaaacctggtgcatatggccccaaaacaccacatgctttgattacactcaggaagcatgagttgcctatttgggtgagaaaatcccatgttacagtgcgatcactgggcacgttttgggagtaattccagccactgctatgtaagtgtttttaattcaggggtgtcttctacgttttcatcttctgaatatcttgtgacggtgcaggtttgaggcaaaactgggcatggaaatgaggagctgttttaggatggaaggattgccaagntgggatgggcttgggcccacagtgggcagtngggttggggggtgggattnttgggacatttaggggaaaaggg

SEQ ID NO: 6273 - DNA, 449 bp, Homo sapiens; identical to SEQ ID NO: 5827
  misc_feature (1)..(449): n=a,t,g or c

SEQ ID NO: 6274 - DNA, 322 bp, Homo sapiens; identical to SEQ ID NO: 1620
  misc_feature (1)..(322): n=a,t,g or c

SEQ ID NO: 6275 - DNA, 459 bp, Homo sapiens
  misc_feature (1)..(459): n=a,t,g or c
tgnnttcattntcaacattaaatgactatttatttttcaggtttaaaagatttcaaaatacatatgtacaagataaataaactacacaaaaattatgtcatcaaatatatttaaaaaaaaattcaaggtaggcaacttagatcaccttggcaaagaacacattaactangatgaaccaggacaagtcccctaaacatcaggatgaaatttcttttctatgcctactagctgactggccttccttttctgngttgagttgtgtactctggagtcaccagcctctggtagattatcaagcatctcttcctcatcagccttttgtttctgtcttgcatgcttctctgtccactgtctgggcattcttgaggaaggctggcttattatatttaaattctgagggtatgtcagcctgagcggggtcatcagggttgggttccgacatgagcagccgattagggg

SEQ ID NO: 6276 - DNA, 376 bp, Homo sapiens
  misc_feature (1)..(376): n=a,t,g or c
tttttattatcttgctttatatttaatggattagaactataaagattcttaactttgaaagcagaaatataagttggatagtagttgcagatctttaataccattttcaatttcatttatgagctgctacattataaatgagatgctctaaaataataatcgcttttgttgttgttgttataggaacaatgaaaattcctgttaggaacacaagttgctgtttatatttgcttgttctcttaaatngtatgagganggaaggtaaggtgggagctgttgggaaaagcccatcgtgggacctttgggaggattatcttcttgggttcaggtcatcnccaccacaggntttttaagggtgtggatttcctaggtctcc

SEQ ID NO: 6277 - DNA, 426 bp, Homo sapiens
  misc_feature (1)..(426): n=a,t,g or c
nnncnttttttttttttcncactcagatacacattttatttcatcaacacatcttgatttctattactttttncaatataacaaaatgttttagagatatatatgaaaaactactgctgtagttagaccccattataaatatnggngactgggcaccatgtgagaagaccacgatatcatacaangggagccaatgagctgttggacaaacgcgtcaaggctgaaccaaaattgtgacgctctcagcgcaactttgatctgaactcttgacaggtgggcatccaacatccctgctccttgaccctctgcaggattccaggaagggctcccagtgaaggtcatcagggctccgtacacagggcaccgtggggggnagggcctatggtcacttcataggccggggggaatgggctntccatgtggggg

SEQ ID NO: 6278 - DNA, 387 bp, Homo sapiens; identical to SEQ ID NO: 1180
  misc_feature (1)..(387): n=a,t,g or c

SEQ ID NO: 6279 - DNA, 419 bp, Homo sapiens; identical to SEQ ID NO: 1399
  misc_feature (1)..(419): n=a,t,g or c

SEQ ID NO: 6280 - DNA, 245 bp, Homo sapiens
  misc_feature (1)..(245): n=a,t,g or c
ncatttttattttccaatactatacaaaaaatagactgtgcatatcttaacagatccagatccaaattaaatactttttttctatttcaaactattctaagttgctaaggtgataatccagttttgagctctactctcttccactgactacttggctctcataggcatagganttctngccctatttcccacaaactccataaatggacattnctttntgtangagggggatatttncttcnaca

SEQ ID NO: 6281 - DNA, 450 bp, Homo sapiens; identical to SEQ ID NO: 2708
  misc_feature (1)..(450): n=a,t,g or c

SEQ ID NO: 6282 - DNA, 2259 bp, Homo sapiens; identical to SEQ ID NO: 431

SEQ ID NO: 6283 - DNA, 6896 bp, Homo sapiens; identical to SEQ ID NO: 4822

SEQ ID NO: 6284 - DNA, 309 bp, Homo sapiens; identical to SEQ ID NO: 438

SEQ ID NO: 6285 - DNA, 2116 bp, Homo sapiens
cggttctccaagcacccagcatcctgctagacgcgccgcgcaccgacggaggggacatgggcagagcaatggtggccaggctggggctggggctgctgctgctggcactgctcctacccacgcagatttattccagtgaaacaacaactggaacttcaagtaactcctcccagagtacttccaactctgggttggccccaaatccaactaatgccaccaccaaggcggctggtggtgccctgcagtcaacagccagtctcttcgtggtctcactctctcttctgcatctctactcttaagagactcaggccaagaaacgtcttctaaatttccccatcttctaaacccaatccaaatggcgtctggaagtccaatgtggcaaggaaaaacaggtcttcatcgaatctactaattccacaccttttattgacacagaaaatgttgagaatcccaaatttgattgatttgaagaacatgtgagaggtttgactagatgatgaatgccaatattaaatctgctggagtttcatgtacaagatgaaggagaggcaacatccaaaatagttaagacatgatttccttgaatgtggcttgagaaatatggacacttaatactaccttgaaaataagaatagaaataaaggatgggattgtggaatggagattcagttttcattggttcattaattctataaggccataaaacaggtaatataaaaagcttccatcgatctatttatatgtacatgagaaggaatccccaggtgttactgtaattcctcaacgtattgtttcgacggcactaatttaatgccgatatactctagatgaatgtttacattgttgagctattgctgttctcttgggaactgaactcactttcctcctgaggctttggatttgacattgcatttgaccttttaggtagtaattgacatgtgccagggcaatgatgaatgagaatctaccccagatccaagcatcctgagcaactcttgattatccatattgagtcaaatggtaggcatttcctatcacctgtttccattcaacaagagcactacattcttttagctaaacggattccaaagagtagaattgcattgaccacgactaatttcaaaatgctttttattattattattttttagacagtctcactttgtcgcccaggccggagtgcagtggtgcgatctcagatcagtgtaccatttgcctcccgggctcaagcgattctcctgcctcagcctcccaagtagctgggattacaggcacctgccaccatgcccggctaatttttgtaattttagtagagacagggtttcaccatgttgcccaggctggtttagaactcctgacctcaggtgatccacccgcctcggcctcccaaagtgctgggattacaggcttgagcccccgcgcccagccatcaaaatgctttttatttctgcatatgtttgaatactttttacaatttaaaaaaatgatctgttttgaaggcaaaattgcaaatcttgaaattaagaaggcaaaatgtaaaggagtcaaactataaatcaagtatttgggaagtgaagactggaagctaatttgcataaattcacaaacttttatactctttctgtatatacattttttttctttaaaaaacaactatggatcagaatagcaacatttagaacactttttgttatcagtcaatatttttagatagttagaacctggtcctaagcctaaaagtgggcttgattctgcagtaaatcttttacaactgcctcgacacacataaacctttttaaaaatagacactccccgaagtcttttgtttgtatggtcacacactgatgcttagatgttccagtaatctaatatggccacagtagtcttgatgaccaaagtcctttttttccatctttagaaaactacatgggaacaaacagatcgaacagttttgaagctactgtgtgtgtgaatgaacactcttgctttattccagaatgctgtacatctattttggattgtatattgtggttgtgtatttacgctttgattcatagtaacttcttatggaattgatttgcattgaacgacaaactgtaaataaaaagaaacggtg

SEQ ID NO: 6286 - DNA, 1834 bp, Homo sapiens
agacggtgctggtgactcgtccacactgctcgcttcggatactccaggcgtctcccgttgcggccgctccctgccttagaggccagccttggacacttgctgcccctttccagcccggattctgggatccttccctctgagccaacatctgggtcctgccttcgacaccaccccaaggcttcctaccttgcgtgcctggagtctgccccaggggcccttgtcctggccatggcccagaagggggtcctggggcctgggcagctgggggctgtggccattctgctctatcttggattactccggtcggggacaggagcggaaggggcagaagctccctgcggtgtggccccccaagcacgcatcacaggtggcagcagtgcagtcgccggtcagtggccctggcaggtcagcatcacctatgaaggcgtccatgtgtgtggtggctctctcgtgtctgagcagtgggtgctgtcagctgctcactgcttccccagcgagcaccacaaggaagcctatgaggtcaagctgggggcccaccagctagactcctactccgaggacgccaaggtcagcaccctgaaggacatcatcccccaccccagctacctccaggagggctcccagggcgacattgcactcctccaactcagcagacccatcaccttctcccgctacatccggcccatctgcctccctgcagccaacgcctccttccccaacggcctccactgcactgtcactggctggggtcatgtggccccctcagtgagcctcctgacgcccaagccactgcagcaactcgaggtgcctctgatcagtcgtgagacgtgtaactgcctgtacaacatcgacgccaagcctgaggagccgcactttgtccaagaggacatggtgtgtgctggctatgtggaggggggcaaggacgcctgccagggtgactctgggggcccactctcctgccctgtggagggtctctggtacctgacgggcattgtgagctggggagatgcctgtggggcccgcaacaggcctggtgtgtacactctggcctccagctatgcctcctggatccaaagcaaggtgacagaactccagcctcgtgtggtgccccaaacccaggagtcccagcccgacagcaacctctgtggcagccacctggccttcagctctgccccagcccagggcttgctgaggcccatccttttcctgcctctgggcctggctctgggcctcctctccccatggctcagcgagcactgagctggccctacttccaggatggatgcatcacactcaaggacaggagcctggtccttccctgatggcctttggacccagggcctgacttgagccactccttccttcaggactctgcgggaggctggggccccatcttgatctttgagcccattcttctgggtgtgctttttgggaccatcactgagagtcaggagttttactgcctgtagcaatggccagagcctctggcccctcacccaccatggaccagcccattggccgagctcctggggagctcctgggacccttggctatgaaaatgagccctggctcccacctgtttctggaagactgctcccggcccgcctgcccagactgatgagcacatctctctgccctctccctgtgttctgggctggggccacctttgtgcagcttcgaggacaggaaaggccccaatcttgcccactggccgctgagcgcccccgagccctgactcctggactccggaggactgagcccccaccggaactgggctggcgcttggatctggggtgggagtaacagggcagaaatgattaaaatgtttgagcac

SEQ ID NO: 6287 - DNA, 1517 bp, Homo sapiens; identical to SEQ ID NO: 5851

SEQ ID NO: 6288 - DNA, 1493 bp, Homo sapiens; identical to SEQ ID NO: 5852

SEQ ID NO: 6289 - DNA, 3370 bp, Homo sapiens
gcccccgcccggcccgccccgctctcctagtcccttgcaacctggcgctgcatccgggccactgtcccaggtcccaggtcccggcccggagctatggagcggcgctggcccctggggctagggctggtgctgctgctctgcgccccgctgcccccgggggcgcgcgccaaggaagttactctgatggacacaagcaaggcacagggagagctgggctggctgctggatcccccaaaagatgggtggagtgaacagcaacagatactgaatgggacacccctctacatgtaccaggactgcccaatgcaaggacgcagagacactgaccactggcttcgctccaattggatctaccgcggggaggaggcttcccgcgtccacgtggagctgcagttcaccgtgcgggactgcaagagtttccctgggggagccgggcctctgggctgcaaggagaccttcaaccttctgtacatggagagtgaccaggatgtgggcattcagctccgacggcccttgttccagaaggtaaccacggtggctgcagaccagagcttcaccattcgagaccttgcgtctggctccgtgaagctgaatgtggagcgctgctctctgggccgcctgacccgccgtggcctctacctcgctttccacaacccgggtgcctgtgtggccctggtgtctgtccgggtcttctaccagcgctgtcctgagaccctgaatggcttggcccaattcccagacactctgcctggccccgctgggttggtggaagtggcgggcacctgcttgccccacgcgcgggccagccccaggccctcaggtgcaccccgcatgcactgcagccctgatggcgagtggctggtgcctgtaggacggtgccactgtgagcctggctatgaggaaggtggcagtggcgaagcatgtgttgcctgccctagcggctcctaccggatggacatggacacaccccattgtctcacgtgcccccagcagagcactgctgagtctgagggggccaccatctgtacctgtgagagcggccattacagagctcccggggagggcccccaggtggcatgcacaggtcccccctcggccccccgaaacctgagcttctctgcctcagggactcagctctccctgcgttgggaacccccagcagatacggggggacgccaggatgtcagatacagtgtgaggtgttcccagtgtcagggcacagcacaggacggggggccctgccagccctgtggggtgggcgtgcacttctcgccgggggcccgggcgctcaccacacctgcagtgcatgtcaatggccttgaaccttatgccaactacacctttaatgtggaagcccaaaatggagtgtcagggctgggcagctctggccatgccagcacctcagtcagcatcagcatggggcatgcagagtcactgtcaggcctgtctctgagactggtgaagaaagaaccgaggcaactagagctgacctgggcggggtcccggccccgaagccctggggcgaacctgacctatgagctgcacgtgctgaaccaggatgaagaacggtaccagatggttctagaacccagggtcttgctgacagagctgcagcctgacaccacatacatcgtcagagtccgaatgctgaccccactgggtcctggccctttctcccctgatcatgagtttcggaccagcccaccagtgtccaggggcctgactggaggagagattgtagccgtcatctttgggctgctgcttggtgcagccttgctgcttgggattctcgttttccggtccaggagagcccagcggcagaggcagcagaggcacgtgaccgcgccaccgatgtggatcgagaggacaagctgtgctgaagccttatgtggtacctccaggcatacgaggaccctgcacagggagccttggactttacccggaggctggtctaattttccttcccgggagcttgatccagcgtggctgatggtggacactgtcataggagaaggagagtttggggaagtgtatcgagggaccctcaggctccccagccaggactgcaagactgtggccattaagaccttaaaagacacatccccaggtggccagtggtggaacttccttcgagaggcaactatcatgggccagtttagccacccgcatattctgcatctggaaggcgtcgtcacaaagcgaaagccgatcatgatcatcacagaatttatggagaatgcagccctggatgccttcctgagggagcgggaggaccagctggtccctgggcagctagtggccatgctgcagggcatagcatctggcatgaactacctcagtaatcacaattatgtccaccgggacctggctgccagaaacatcttggtgaatcaaaacctgtgctgcaaggtgtctgactttggcctgactcgcctcctggatgactttgatggcacatacgaaacccagggaggaaagatccctatccgttggacagcccctgaagccattgcccatcggatcttcaccacagccagcgatgtgtggagctttgggattgtgatgtgggaggtgctgagctttggggacaagccttatggggagatgagcaatcaggaggttatgaagagcattgaggatgggtaccggttgccccctcctgtggactgccctgcccctctgtatgagctcatgaagaactgctgggcatatgaccgtgcccgccggccacacttccagaagcttcaggcacatctggagcaactgcttgccaacccccactccctgcggaccattgccaactttgaccccagggtgactcttcgcctgcccagcctgagtggctcagatgggatcccgtatcgaaccgtctctgagtggctcgagtccatacgcatgaaacgctacatcctgcacttccactcggctgggctggacaccatggagtgtgtgctggagctgaccgctgaggacctgacgcagatgggaatcacactgcccgggcaccagaagcgcattctttgcagtattcagggattcaaggactgatccctcctctcaccccatgcccaatcagggtgcaaggagcaaggacggggccaaggtcgctcatggtcactccctgcgccccttcccacaacctgccagactaggctatcggtgctgcttctgcccgctttaaggagaaccctgctctgcaccccagaaaacctctttgttttaaaagggaggtgggggtagaagtaaaaggatgatcatgggagggagctcaggggttaatatatatacatacatacacatatatatattgttgtaaataaacaggaaatgattttctgcctccatcccacccatcagggctgcaggcact

SEQ ID NO: 6290 - DNA, 1452 bp, Homo sapiens; identical to SEQ ID NO: 1008

SEQ ID NO: 6291 - DNA, 4567 bp, Homo sapiens; identical to SEQ ID NO: 3246

SEQ ID NO: 6292 - DNA, 1194 bp, Homo sapiens
ggccggagggagcccgcgctcggggcggcggctggaggcagcgcaccgagttcccgcgaggatccatgacctgacggggccccggagccgcgctgcctctcgggtgtcctgggtcggtggggagcccagtgctcgcaggccggcgggcgggccggagggctgcagtctccctcgcggtgagaggaaggcggaggagcgggaaccgcggcggcgctcgcgcggcgcctgcggggggaagggcagttccgggccgggccgcgcctcagcagggcggcggctcccagcgcagtctcagggcccgggtggcggcggcgactggagaaatcaagttgtgcggtcggtgatgcccgagtgagcggggggcctgggcctctgcccttaggaggcaactcccacgcaggccgcaaagggctctcgcggccgagaggcttcgtttcggtttcgcggcggcggcggcgttgttggctgaggggacccgggacacctgaatgcccccggccccggctcctccgacgcgatggggaaggtgctatccaaaatcttcgggaacaaggaaatgcggatcctcatgttgggcctggacgcggccggcaagacaacaatcctgtacaagttgaagctgggccagtcggtgaccaccattcccactgtgggtttcaacgtggagacggtgacttacaaaaatgtcaagttcaacgtatgggatgtgggcggccaggacaagatccggccgctctggcggcattactacactgggacccaaggtctcatcttcgtagtggactgcgccgaccgcgaccgcatcgatgaggctcgccaggagctgcaccgcattatcaatgaccgggagatgagggacgccataatcctcatcttcgccaacaagcaggacctgcccgatgccatgaaaccccacgagatccaggagaaactgggcctgacccggattcgggacaggaactggtatgtgcagccctcctgtgccacctcaggggacggactctatgaggggctcacatggttaacctctaactacaaatcttaatgagcattctccacccatcccctggaaggagagaaatcaaaaacccattcataggattatcgccaccatcacctctttcaattgccactttctcttcttttgaatttgaactctggagttactgttctacagtttggcggggacggggc

SEQ ID NO: 6293 - DNA, 3866 bp, Homo sapiens
ggaattcctttttttttttttttgagatggagtttcactcttgttggccaggctggagtgcaatggcacaatctcagcttactgcaacctccgcctcccgggttcaagcgattctcctgcctcagcctctcaagtagctgggattacaggcatgtgccaccacccctggctaactaatttcttttctatttagtagagatggggtttcaccatgttggtcaggctggtcttgaactcctgacctcaggtgatccacttgccttggcctcccaaagtgctaggattacagccgtgaaactgtgcctggctgattctttttttgttgttggatttttgaaacagggtctcccttggtcgcccaggctggagtgcagtggtgcgatcttggctcactataacctccacctcctggtttcaagtgatcctcccactttagcctcctgagtagctgtgattacaggcgtgcaccaccacacccggctaatttttgtatttttattagagacagggtttcaccatgttggccaggctgttctcaaactcctggactcaagggatccgcctgcctccacttcccaaagtcccgagattacaggtgtgagtcaccatgcctgaccttataattcttaagtcattttttctggtccatttcttccttagggtcctcacaacaaatctgcattaggcggtacaataatccttaacttcatgattcacaaaaggaagatgaagtgattcatgatttagaaaggggaagtagtaagcccactgcacactcctggatgatgatcctaaatccagatacagtaaaaatggggtatgggaaggtagaatacaaaatttggtttaaattaattatctaaatatctaaaaacatttttggatacattgttgatgtgaatgtaagactgtacagacttcctagaaaacagtttgggttccatcttttcatttccccagtgcagttttctgtagaaatggaatccgaggatttaagtggcagagaattgacaattgattccataatgaacaaagtgagagacattaaaaataagtttaaaaatgaagaccttactgatgaactaagcttgaataaaatttctgctgatactacagataactcgggaactgttaaccaaattatgatgatggcaaacaacccagaggactggttgagtttgttgctcaaactagagaaaaacagtgttccgctaagtgatgctcttttaaataaattgattggtcgttacagtcaagcaattgaagcgcttcccccagataaatatggccaaaatgagagttttgctagaattcaagtgagatttgctgaattaaaagctattcaagagccagatgatgcacgtgactactttcaaatggccagagcaaactgcaagaaatttgcttttgttcatatatcttttgcacaatttgaactgtcacaaggtaatgtcaaaaaaagtaaacaacttcttcaaaaagctgtagaacgtggagcagtaccactagaaatgctggaaattgccctgcggaatttaaacctccaaaaaaagcagctgctttcagaggaggaaaagaagaatttatcagcatctacggtattaactgcccaagaatcattttccggttcacttgggcatttacagaataggaacaacagttgtgattccagaggacagactactaaagccaggtttttatatggagagaacatgccaccacaagatgcagaaataggttaccggaattcattgagacaaactaacaaaactaaacagtcatgcccatttggaagagtcccagttaaccttctaaatagcccagattgtgatgtgaagacagatgattcagttgtaccttgttttatgaaaagacaaacctctagatcagaatgccgagatttggttgtgcctggatctaaaccaagtggaaatgattcctgtgaattaagaaatttaaagtctgttcaaaatagtcatttcaaggaacctctggtgtcagatgaaaagagttctgaacttattattactgattcaataaccctgaagaataaaacggaatcaagtcttctagctaaattagaagaaactaaagagtatcaagaaccagaggttccagagagtaaccagaaacagtggcaagctaagagaaagtcagagtgtattaaccagaatcctgctgcatcttcaaatcactggcagattccggagttagcccgaaaagttaatacagagcagaaacataccacttttgagcaacctgtcttttcagtttcaaaacagtcaccaccaatatcaacatctaaatggtttgacccaaaatctatttgtaagacaccaagcagcaataccttggatgattacatgagctgttttagaactccagttgtaaagaatgactttccacctgcttgtcagttgtcaacaccttatggccaacctgcctgtttccagcagcaacagcatcaaatacttgccactccacttcaaaatttacaggttttagcatcttcttcagcaaatgaatgcatttcggttaaaggaagaatttattccatattaaagcagataggaagtggaggttcaagcaaggtatttcaggtgttaaatgaaaagaaacagatatatgctataaaatatgtgaacttagaagaagcagataaccaaactcttgatagttaccggaacgaaatagcttatttgaataaactacaacaacacagtgataagatcatccgactttatgattatgaaatcacggaccagtacatctacatggtaatggagtgtggaaatattgatcttaatagttggcttaaaaagaaaaaatccattgatccatgggaacgcaagagttactggaaaaatatgttagaggcagttcacacaatccatcaacatggcattgttcacagtgatcttaaaccagctaactttctgatagttgatggaatgctaaagctaattgattttgggattgcaaaccaaatgcaaccagatacaacaagtgttgttaaagattctcaggttggcacagttaattatatgccaccagaagcaatcaaagatatgtcttcctccagagagaatgggaaatctaagtcaaagataagccccaaaagtgatgtttggtccttaggatgtattttgtactatatgacttacgggaaaacaccatttcagcagataattaatcagatttctaaattacatgccataattgatcctaatcatgaaattgaatttcccgatattccagagaaagatcttcaagatgtgttaaagtgttgtttaaaaagggacccaaaacagaggatatccattcctgagctcctggctcatccatatgttcaaattcaaactcatccagttaaccaaatggccaagggaaccactgaagaaatgaaatatgttctgggccaacttgttggtctgaattctcctaactccattttgaaagctgctaaaactttatatgaacactatagtggtggtgaaagtcataattcttcatcctccaagacttttgaaaaaaaaaggggaaaaaaatgatttgcagttattcgtaatgtcagataggaggtataaaatatattggactgttatactcttgaatccctgtggaaatctacatttgaagacaacatcactctgaagtgttatcagcaaaaaaaattcagtgagattatctttaaaagaaaactgtaaaaatagcaaccacttatggcactgtatatattgtagacttgttttctctgttttatgctcttgtgtaatctacttgacatcattttactcttggaatagtgggtggatagcaagtatattctaaaaaactttgtaaataaagttttgtggctaaaatga

SEQ ID NO: 6294 - DNA, 3175 bp, Homo sapiens; identical to SEQ ID NO: 3992

SEQ ID NO: 6295 - DNA, 479 bp, Homo sapiens
  misc_feature (1)..(479): n=a,t,g or c
tactttcagaacattttctattataagtcagaaggaaaaaagcttactgtatatgacagtcttcctgaaacctaagagaaagttttaaccaggccctatggcaatgcagaaacactaatacattttacagtgaaaacctactttaacacatctcaaaatgataatccgtataanactttctagttctaatttgcactctacgtgaaccaatatttttcttttcttaacacatactgctcttctataccaaacacttgccctttaaccttcagataaaaacctcaaataccaaaaaatgcaacaagcttttgaggtgttgggaattgttggttgttaaaatcccttttattttataataaattatacaggcaatccttggctttttattaccacactgggattgcttctgtacacagctaagttgcctgaagcatgggaaacttggacttctccatctgacacgntctgggagcctccag

SEQ ID NO: 6296 - DNA, 472 bp, Homo sapiens
  misc_feature (1)..(472): n=a,t,g or c
gcatcataatgagtaaggatgtcaataattgccatgaagtacacctccttcctaggcgagttttcatggcacttaattccatagacgtcgatgttcggatcgaactccccgggagccaggggtggtgagctgttcagtgtattcccggggctatctgggggggttcccaccgggtggtngccatcgctctcgccctcctcctccccatcgttctcctcacactccacttcctcctgttcggctctctccacatcatgaattcccaccagcagactgtagtccatgagcttcanctgggccagaaactcaacatccttttttagtttttccaggaagaccttcttgctgttgtcatcaatataaatcttttggccctcattaatgaaatcattatctttcagagttgggcagttctttgggccttttctttggtcactagcttctctagccactggtagagccctttaagtcg

SEQ ID NO: 6297 - DNA, 488 bp, Homo sapiens; identical to SEQ ID NO: 457
  misc_feature (1)..(488): n=a,t,g or c

SEQ ID NO: 6298 - DNA, 503 bp, Homo sapiens
  misc_feature (1)..(503): n=a,t,g or c
gactttgatatgtttatattatagatataatacataaaacatctagagtgagactctacgttctccccaaaagaagagaaccaagccgtccttccctgctcccagccccagtgatgcgttggcgggaggcacctcccttcccgaccaggagccagggcctctgggggacaagccttgtgggcagcccaggccggagggctggggaaagctgagggcaaaggagaacccccctcacctcattggtcccccaggatcaaaagtaatcccaaaaccaaaaggaaagggagtctcagacccttcccccagcttgccgacggagagtctcnttttggcaagtatccgagcaaaaccaaaacaaaacaaaaaccaaataaaatggtggtttagcagagacgcgcacattcacattggcacaagggcactgctggggggcacagagggccagatacaagtgtttgatatcggcttgataaagcaaaatatttggnaaagctttgtcataa

SEQ ID NO: 6299 - DNA, 464 bp, Homo sapiens
  misc_feature (1)..(464): n=a,t,g or c
gcgtgatcatctaaattcaaactggaaagctttactcttaagactactactcgtgctctggggttccgaacagatggtcctgatgaaacataatcagtgctgtcaatttcaattggaaaatgcttctcacatttctcgtcactgtccagtgcggctggccactcagtgcaaaaatctttaagggcttcacagtgctttttaattgctacaggagtcaaatgcagaaaattgggaatctttaaaagttctagatttccctcctttgccatggnaccgcccttttttactggataacccattcgaacaggaagaggtactgcagagggtttaaatgggtgctgcaactgggtaaacactaggccagtcctggtcaacagccattttctctgtcctaggaggtagtgcctttcttcttgggtggcctttcatttctgggtgttctttccggcagctaggtgtcggga

SEQ ID NO: 6300 - DNA, 437 bp, Homo sapiens
  misc_feature (1)..(437): n=a,t,g or c
catatagtcagttaaactttattatttacaagttaaattacacagcagctttacacagcatgagatggaaaggaaggaaggagagaaacgaggagaggaagctggctcctgagattcttggctgcctccacctccttctcttgggcgtacagtcttcagtgctgcctccactccaaggtcaaggatcagggcttggaacacaggtttaagtcaggttctggctctgacagccccagggccaccagggctcccactagcagcttcttcacaggcgttggaggtgagtgtgaaggcatcagctgcagggagaaaggttaatgccagttngggggaggcacacaaatgttctacccttttaaccccacccagccctaccctaagggactccaatttatctaagacgatgggcgacaaatganggccacntggaatttcaa

SEQ ID NO: 6301 - DNA, 327 bp, Homo sapiens; identical to SEQ ID NO: 5127

SEQ ID NO: 6302 - DNA, 437 bp, Homo sapiens
ggaaaatcaaaatttttttattaatttactggatttcctatacctaacaatccttaaaacaactatcaacagctgcaacacaaaccacaggcaaaatgaaaaacagatgccccagacagcaccccaccacatggcacacacttaataaggaacaaaatcctacagggtgctgacataactcgctttaagcatgcaatgattcctgcagtgctccctggcaatcaacctctctgcaccctggggctggatacttcaaagtctttgttctcttaacaggtttgaagtcaacatggcaagttaaggacaagttagatgagatccccctagttcataacgtgagttcctcttgctctccaatgttcatccacaagtacagggtccaatcccctataagagatgggcttaagcatcccaatggggaaacagcctggccagcc

SEQ ID NO: 6303 - DNA, 453 bp, Homo sapiens; identical to SEQ ID NO: 741

SEQ ID NO: 6304 - DNA, 436 bp, Homo sapiens; identical to SEQ ID NO: 471
  misc_feature (1)..(436): n=a,t,g or c

SEQ ID NO: 6305 - DNA, 270 bp, Homo sapiens; identical to SEQ ID NO: 5366
  misc_feature (1)..(270): n=a,t,g or c

SEQ ID NO: 6306 - DNA, 139 bp, Homo sapiens; identical to SEQ ID NO: 5689

SEQ ID NO: 6307 - DNA, 282 bp, Homo sapiens
  misc_feature (1)..(282): n=a,t,g or c
ttttttttttngtgattatacgttttattagactcngggaggggtaatggcaaggncttcatcangtgttccttcaaattaaaaaaaaaaaatacaaaagctacgtagaaaacgtcagatcagacgactaaactttcccgactcagggccaagttcttcttgagcctgcgctctcgggacgcctgcgagtcggtctccgagtacgggggcggcgcgggcgggtagtaggcctcttcctcctcctccttgtggggtctcctcctctcctccgaccccttcttc

SEQ ID NO: 6308 - DNA, 248 bp, Homo sapiens
  misc_feature (1)..(248): n=a,t,g or c
ttttttttttgcttttagaatactggtgcattttttattaaagaagagaataaagcatttgtaaatatatttctctcacgtatacttcaaaggtgacgctggtctgccactacagagctggggagcagacaggctggagctcttcccccaacccttccacactcctctcccccagataacagacacacacggagggcagggagctgcntagcctcaaaggncaaaagtttcccagttgcacgtacaga

SEQ ID NO: 6309 - DNA, 429 bp, Homo sapiens; identical to SEQ ID NO: 479
  misc_feature (1)..(429): n=a,t,g or c

SEQ ID NO: 6310 - DNA, 331 bp, Homo sapiens; identical to SEQ ID NO: 1153

SEQ ID NO: 6311 - DNA, 459 bp, Homo sapiens
  misc_feature (1)..(459): n=a,t,g or c
tttttttttttttttttaataattaaaagccattttattgtcaatactgactgtcatacaactgaaacacttggaaggaaaatcacaagaatccacaaaaggacagattcagagaagtgcaagggacaaagtatctacaatagaaaatcatttcgtgacattgacttctttctgtccagctgtaaaagagggaacacagagtcaatatctatagagcacgtttcaattacactaagantttaaaaaagaaaaagaaaataaagaaaattattgtattgcagagttttccantgaccacacaattagccagggctttaagcttcttctcttggtcgtcatttcccttgctgtcattctgtgacctcctgggtgaatctgtgggctgacacatcacaagtgtgttaacnatttcttgggngttaccgtcagtgctcaggtcngtaggctgggaaaagtctc

SEQ ID NO: 6312 - DNA, 444 bp, Homo sapiens; identical to SEQ ID NO: 2547
  misc_feature (1)..(444): n=a,t,g or c

SEQ ID NO: 6313 - DNA, 292 bp, Homo sapiens
gtggagcaggaggttttattgtaaagaggccgattgtacagagcaaagattgttctgacacggggggctgggtggtgggacccagaggccagagctgggtgaaggatgaggggtggcatcgcccatccaggcagtgggcagggcagggaggactaaacggctgcctcccagttcccttccctgcccctcattactgggtaagagggagccaggctatttccacggatccaggagaatatagcaggagaccctcaccaccccacaccatgccccaaggatacgggaggtgccc

SEQ ID NO: 6314 - DNA, 294 bp, Homo sapiens
  misc_feature (1)..(294): n=a,t,g or c
ttttttttttttttttttttttgctgtnaaanaactttaatggttgatntgggagtcacaagggaggtatntttgctccaagggttcttcagtgccatcctcaaagctggttagtgcagggaggtagggcagagttggttccagttttcttccaggaagggtttagggaggtcccagcgagccccaggantgagtccctcggtaccatgggcaaccacantttaagaggggnttntgccancccntgnagcctaccccaggtccagcagaggaacaggaggccagantggcaaa

SEQ ID NO: 6315 - DNA, 426 bp, Homo sapiens
  misc_feature (1)..(426): n=a,t,g or c
aatttnacacgcactnaaanntttttattngaaaaagtcttagagactcagtaaggcacgaagtccaggnngggggcagggtccctgggcgcggtgnaccaggnccancagggcttcagtnccggatcccccactntggtngagnttccccgctctctccagcagccccgctcccgtggacctgaggacaagggagccctttcatccgagatgctgagtatgggcaacagggaggaggggaaggaagaggcagctccaccgtgtgggtntgggcggggggatggggctctgcaggagcttnatgctccttcggaccctgaaggcacttacgactaggaaggcccggcttcaggggcaggtcctgggancttgggcaggggtngggggctcagctnggcttatttngtttttgggngaaggngcaat

SEQ ID NO: 6316 - DNA, 534 bp, Homo sapiens; identical to SEQ ID NO: 486

SEQ ID NO: 6317 - DNA, 401 bp, Homo sapiens; identical to SEQ ID NO: 2552

SEQ ID NO: 6318 - DNA, 199 bp, Homo sapiens; identical to SEQ ID NO: 5979
  misc_feature (1)..(199): n=a,t,g or c

SEQ ID NO: 6319 - DNA, 365 bp, Homo sapiens
  misc_feature (1)..(365): n=a,t,g or c
ntccanacatnttcattttattnagtggaaagcttacaaaaggnccactngccccttccctccccacgngacacgtcattccttccaatgcaaantctggtntatccacactcacttctgcgtcaccggtttcccccaacaaggcacaaagggcgggtgcttccaaaggatcccttggtcctggcagcgggactgtcagtgctgggtttcttntgcaantggnggctgnaanagggactnttagttnactcngacactgggatcttccttactcctgaagaggggcttggctccaggcccgcagtactcggttgtagatgagcttgaagaggangaggtggaagagggtgattagggaggccacg

SEQ ID NO: 6320 - DNA, 358 bp, Homo sapiens
aaggggggtatttgtttaatacctctctctctcccatttttgttttatacaagttgcatttctagccaccacatcattggcatcttattccagaagaatagcattagttctagcacttgccaggcgggtgcatgcgcaagagtccgtacgcccacctgctgcggtagttctcccgcctggcctctccatcaaggtggagactgccctcatggttttccagctcgtagagacgaacaggtcccggctcttggtcagccgaaccatgagccggcccacatagaagccactgatttggcccacaccgtcatttctccccatggacaggaggaacgtcagtgcacccggcttgtaggctggg

SEQ ID NO: 6321 - DNA, 413 bp, Homo sapiens; identical to SEQ ID NO: 772
  misc_feature (1)..(413): n=a,t,g or c

SEQ ID NO: 6322 - DNA, 306 bp, Homo sapiens
  misc_feature (1)..(306): n=a,t,g or c
ttttttttttcagttttnaagggttatttattaaaccccttggttctgaccccaagctgagtgggactcagattcagaccctgcactcagagagccccctgacttggggaagacagagcagagaaaggcagccccantntggccaggntcagctggaaggaaggacaaggggntgggagaacccaganttcaagagntctgggaaacagggaacggcnttccagacggagggcacaccttgggcatgggtaaggaaagcccatcgttttttntaggaagcatggatggatgaaacggggtcccagc

SEQ ID NO: 6323 - DNA, 422 bp, Homo sapiens
  misc_feature (1)..(422): n=a,t,g or c
taaanntgatttaaaaattactcttttacttttattacaataaataattatcaataataganttaaacaatttcaattaaaacctactgcatnctttggggtttacagcagcagancaaacataaatccagttgaaagggaaggcttccagantccagtgacangaacagtctggtcttgattattcgggcnagcaatgggaaacactgatacagataatgcaaaaacaatgaaatgcatcggcatactctctttgtacatcacattatctgacactttaaaatattccagctangtaatttaggcaggccatgaggctctgtttctgcacagtnggggttctcccccagcaggcccacagcacactgctcccngggccacccttgggccngaacggggcccatcatcangcggcctggagg

SEQ ID NO: 6324 - DNA, 375 bp, Homo sapiens; identical to SEQ ID NO: 5841
  misc_feature (1)..(375): n=a,t,g or c

SEQ ID NO: 6325 - DNA, 495 bp, Homo sapiens
  misc_feature (1)..(495): n=a,t,g or c
gagctaggtattaagattatattaaataatttaactgtattttgaaaatgattatgctgtcatttccttctctgtataaaaagtgctgggattgcaggcatgagcactgcacccaacccctggaaaactaaatttttaagtgcttatttttatagaagtttgaaaatttaatgcaggcaggtgtgtaataaattatttttgaattgaacattaaaattctgcttcttaaagtcagcactcaacttggacatgttgaaattagaatctattcttgtatttgatagacaaaatatgtgggaaagattttttgcatgactttnctctcattttattcttccataatgtatttctactataaaanagaatccaacttggggttatatttgtccattnactttgttctgttnaggatttcgtccagttgtttttgggaaaaattcnaggaaatcagggatggacanatgcagcctttcccggggntgccgggacnggggg

SEQ ID NO: 6326 - DNA, 112 bp, Homo sapiens; identical to SEQ ID NO: 1348

SEQ ID NO: 6327 - DNA, 2790 bp, Homo sapiens; identical to SEQ ID NO: 3545

SEQ ID NO: 6328 - DNA, 577 bp, Homo sapiens; identical to SEQ ID NO: 4614

SEQ ID NO: 6329 - DNA, 6124 bp, Homo sapiens
acaaaaggtcctgtgctcacctgggacccttctggacgttgccctgtgtacctcttcgactgcctgttcatctacgacgaaccccgggtattgaccccagacaacaatgccacttcatattggggacttcgtctgggattccaaggtgcattcattgcaaagttccttaaatattttctcactgcttcctactaaaggacggacagagcatttgttcttcagccacatactttccttccactggccagcattctcctctattagactagaactgtggataaacctcagaaaatggccacccagcagaaagcctctgacgagaggatctcccagtttgatcacaatttgctgccagagctgtctgctcttctgggcctagatgcagttcagttggcaaaggaactagaagaagaggagcagaaggagcgagcaaaaatgcagaaaggctacaactctcaaatgcgcagtgaagcaaaaaggttaaagacttttgtgacttatgagccgtacagctcatggataccacaggagatggcggccgctgggttttacttcactggggtaaaatctgggattcagtgcttctgctgtagcctaatcctctttggtgccggcctcacgagactccccatagaagaccacaagaggtttcatccagattgtgggttccttttgaacaaggatgttggtaacattgccaagtacgacataagggtgaagaatctgaagagcaggctgagaggaggtaaaatgaggtaccaagaagaggaggctagacttgcgtccttcaggaactggccattttatgtccaagggatatccccttgtgtgctctcagaggctggctttgtctttacaggtaaacaggacacggtacagtgtttttcctgtggtggatgtttaggaaattgggaagaaggagatgatccttggaaggaacatgccaaatggttccccaaatgtgaatttcttcggagtaagaaatcctcagaggaaattacccagtatattcaaagctacaagggatttgttgacataacgggagaacattttgtgaattcctgggtccagagagaattacctatggcatcagcttattgcaatgacagcatctttgcttacgaagaactacggctggactcttttaaggactggccccgggaatcagctgtgggagttgcagcactggccaaagcaggtcttttctacacaggtataaaggacatcgtccagtgcttttcctgtggagggtgtttagagaaatggcaggaaggtgatgacccattagacgatcacaccagatgttttcccaattgtccatttctccaaaatatgaagtcctctgcggaagtgactccagaccttcagagccgtggtgaactttgtgaattactggaaaccacaagtgaaagcaatcttgaagattcaatagcagttggtcctatagtgccagaaatggcacagggtgaagcccagtggtttcaagaggcaaagaatctgaatgagcagctgagagcagcttataccagcgccagtttccgccacatgtctttgcttgatatctcttccgatctggccacggaccacttgctgggctgtgatctgtctattgcttcaaaacacatcagcaaacctgtgcaagaacctctggtgctgcctgaggtctttggcaacttgaactctgtcatgtgtgtggagggtgaagctggaagtggaaagacggtcctcctgaagaaaatagcttttctgtgggcatctggatgctgtcccctgttaaacaggttccagctggttttctacctctcccttagttccaccagaccagacgaggggctggccagtatcatctgtgaccagctcctagagaaagaaggatctgttactgaaatgtgcatgaggaacattatccagcagttaaagaatcaggtcttattccttttagatgactacaaagaaatatgttcaatccctcaagtcataggaaaactgattcaaaaaaaccacttatcccggacctgcctattgattgctgtccgtacaaacagggccagggacatccgccgatacctagagaccattctagagatcaaagcatttcccttttataatactgtctgtatattacggaagctcttttcacataatatgactcgtctgcgaaagtttatggtttactttggaaagaaccaaagtttgcagaagatacagaaaactcctctctttgtggcggcgatctgtgctcattggtttcagtatccttttgacccatcctttgatgatgtggctgttttcaagtcctatatggaacgcctttccttaaggaacaaagcgacagctgaaattctcaaagcaactgtgtcctcctgtggtgagctggccttgaaagggtttttttcatgttgctttgagtttaatgatgatgatctcgcagaagcaggggttgatgaagatgaagatctaaccatgtgcttgatgagcaaatttacagcccagagactaagaccattctaccggtttttaagtcctgccttccaagaatttcttgcggggatgaggctgattgaactcctggattcagataggcaggaacatcaagatttgggactgtatcatttgaaacaaatcaactcacccatgatgactgtaagcgcctacaacaattttttgaactatgtctccagcctcccttcaacaaaagcagggcccaaaattgtgtctcatttgctccatttagtggataacaaagagtcattggagaatatatctgaaaatgatgactacttaaagcaccagccagaaatttcactgcagatgcagttacttaggggattgtggcaaatttgtccacaagcttacttttcaatggtttcagaacatttactggttcttgccctgaaaactgcttatcaaagcaacactgttgctgcgtgttctccatttgttttgcaattccttcaagggagaacactgactttgggtgcgcttaacttacagtactttttcgaccacccagaaagcttgtcattgttgaggagcatccacttcccaatacgaggaaataagacatcacccagagcacatttttcagttctggaaacatgttttgacaaatcacaggtgccaactatagatcaggactatgcttctgcctttgaacctatgaatgaatgggagcgaaatttagctgaaaaagaggataatgtaaagagctatatggatatgcagcgcagggcatcaccagaccttagtactggctattggaaactttctccaaagcagtacaagattccctgtctagaagtcgatgtgaatgatattgatgttgtaggccaggatatgcttgagattctaatgacagttttctcagcttcacagcgcatcgaactccatttaaaccacagcagaggctttatagaaagcatccgcccagctcttgagctgtctaaggcctctgtcaccaagtgctccataagcaagttggaactcagcgcagccgaacaggaactgcttctcaccctgccttccctggaatctcttgaagtctcagggacaatccagtcacaagaccaaatctttcctaatctggataagttcctgtgcctgaaagaactgtctgtggatctggagggcaatataaatgttttttcagtcattcctgaagaatttccaaacttccaccatatggagaaattattgatccaaatttcagctgagtatgatccttccaaactagtaaaattaattcaaaattctccaaaccttcatgttttccatctgaagtgtaacttcttttcggattttgggtctctcatgactatgcttgtttcctgtaagaaactcacagaaattaagttttcggattcattttttcaagccgtcccatttgttgccagtttgccaaattttatttctctgaagatattaaatcttgaaggccagcaatttcctgatgaggaaacatcagaaaaatttgcctacattttaggttctcttagtaacctggaagaattgatccttcctactggggatggaatttatcgagtggccaaactgatcatccagcagtgtcagcagcttcattgtctccgagtcctctcatttttcaagactttgaatgatgacagcgtggtggaaattgccaaagtagcaatcagtggaggtttccagaaacttgagaacctaaagctttcaatcaatcacaagattacagaggaaggatacagaaatttctttcaagcactggacaacatgccaaacttgcaggagttggacatctccaggcatttcacagagtgtatcaaagctcaggccacaacagtcaagtctttgagtcaatgtgtgttacgactaccaaggctcattagactgaacatgttaagttggctcttggatgcagatgatattgcattgcttaatgtcatgaaagaaagacatcctcaatctaagtacttaactattctccagaaatggatactgccgttctctccaatcattcagaaataaaagattcagctaaaaactgctgaatcaataatttgtcttggggcatattgaggatgtaaaaaaagttgttgattaatgctaaaaaccaaattatccaaaattattttattaaatattgcatacaaaagaaaatgtgtaaggcttgctaaaaaacaaaacaaaacaaaacacagtcctgcatactcaccaccaagctcaagaaataaatcatcaccaatacctttgaggtccctgagtaatccaccccagctaaaggcaaacccttcaatcaagtttatacagcaaaccctccattgtccatggtcaacagggaaggggttggggacaggtctgccaatctatctaaaagccacaatatggaagaagtattcaatttatataataaatggctaacttaacggttgaatcactttcatacatggatgaaacgggtttaacacaggatccacatgaatcttctgtgggccaagagatgttccttaatccttgtagaacctgttttctatattgaactagctttggtacagtagagttaacttactttccatttatccactgccaatataaagaggaaacaggggttagggaaaaatgacttcattccagaggcttctcagagttcaacatatgctataatttagaattttcttatgaatccactctacttgggtagaaaatattttatctctagtgattgcatattatttccatatcatagtatttcatagtattatatttgatatgagtgtctatatcaatgtcagtgtccagaatttcgttcctaccagttaagtagttttctgaacggccagaagaccattcgaaattcatgatactactataagttggtaaacaaccatacttttatcctcatttttattctcactaagaaaaaagtcaactcccctccccttgcccaagtatgaaatatagggacagtatgtatggtgtggtctcatttgtttagaaaaccacttatgactgggtgcggtggctcacacctgtaatcccagcactttgggaggctgaggcgggcgaatcatttgaggtgaggaattcgagaccagcctggccagcatggtgaaaccccatctctactaaaaatacaaaaattagccaggtgtggtggcacatgcctgtagtcccagccactagggcggctgagacgcaagacttgcttgaacccgggaggcagaggttgcagtgagccaagatggcgccactgcattccagcctgggcaacagagcaagaccctgtctgtctcaaaacaaaaaacaaaaccacttatattgctagctacattaagaatttctgaatatgttactgagcttgcttgtggtaaccatttataatatcagaaagtatatgtacaccaaaacatgttgaacatccatgttgtacaactgaaatataaataattttgtcaattatacctaaataaaactggaaaaaaatttctggaagtttatatctaaaaatgttaatagtgcgtacctctaggaagtgggcctggaagccattcttacttttcagtctctcccattctgtactgttttttgttttactttcgtgcctgcattatttttctatttaaaacaaaaataaatctagtttagcact

SEQ ID NO: 6330 - DNA, 1468 bp, Homo sapiens
gacaccgtggggggtaggtttgatgccactcaggcatttgtcggggagctcagccagttcaacatatgggaccgcgtccttcgcgcacaagaaattgtcaacatcgccaactgctccacaaacatgccgggcaacatcatcccgtgggtggacaataacgtcgatgtgttcggaggggcctccaagtggcccgtggagacgtgtgaggaggctctccttgacttgtagccgccttctcctctgtccaggaggccgggatcaggctgttgccatggaagttcagggccatagactgccccacttaaactcttgtcagtctgggctcagggttcccagagctcattccccaggaatctctaagaccagggctggggcagtgtctgtcactggcttgtttgttccctaccaatattctgttgctgtttgaagtagtgccagggtcccctgggaagatgcccccaagacacctgccccaagtgggtggatatctgccttcctgctgcaagtggaggcaggtccagcagcccctcttcagagcccctgtaaatgctatcgcagcctgagtcctgccgccttccagttccttggtgtcccgtgcaccccttctgtctgtcccctttcatgctgtgcagccgtcccgctggagtggccatgtcccttgtgcattgagtgcatccccgctggtgactaagctcgcagcaagcgctacccccgatctgcaaaagggcctctccctttgtgttctatacattgtgaatcttcccgtctgaagaacgcccagcctgcccagacaaagccccgccttccccaaagcagaggggctgtctgtgtctccagaaaggggacatcggggggggaggggggctcagaaaggagaagggctgtgatctccggtcccttcccccatcatccttccttagactgatgctttgactgaatcatcactagctatggcattaaaaggcctctcttctcatctggtgccaaaggttccgttgcagctttttacaaccatccggtgtggtttggaggatttgttttttttttttcccaacagaaaagaacagccattagaagaaggctcccattttctgatgttccgccccactgtgaagagtgtgctcgttttaaattcatgttgattcttgtaagcactggactgtcttcatcaagtatttcccctacagaactcctcaagaaaaacagagatcatttggctagagattgtctgagtgactccaagctactcactgtattggacgggagtagtaatttattttaaagataaagtgactaagtggggaaatttataaagctaaatattatatattttatttttcatacatgtttgaagtgcaaatctgtggatattccatttgtaggaccaagtcgacatgcccatcctgacattgtatgctacgagaactcttctgatgatggaatttcgattaaagtgcactgaaagatg

SEQ ID NO: 6331 - DNA, 10211 bp, Homo sapiens; identical to SEQ ID NO: 4180

SEQ ID NO: 6332 - DNA, 2448 bp, Homo sapiens
gggttggttccaagtctttgctattgtgaatagtgccgcaataaacatacgtgtgcatgtgtctttatagcagcatgatttatagtcctttgggtatatacccagtaatgggatggctgggttctagatccctgaggaatcgccacattgacttgcacaatggttgaactagtttacagtcccaccaacagtgtaaaagtgttcctatttctccacatcctctccggcacctgttgtttcctgactttttaatgattgccattctaactggtgtgagatgatatctcattgtggttttgatttgcatttctctgatggccagtgatggtgagcattttttcatgtgttttttggctgcataaatgtcttcttttgagaagtgtctgttcatgatttttttttttagacaaagtattagatcagatatttttggggaaaaatgctttgtgattgcttgttttgaatggtgagcattgtattttgttttaagttgttttctggttgttattacagctatgaagtcttacactccatatttcattctcctgtggagtgctgttgggatagcgaaggctgccaaaatcatcatcgtgccgccaattatgtttgaaagccatatgtacattttcaagacgctagcctcagccttgcacgagagaggccaccatacagtgttcctcctctctgaaggcagagacatcgccccatctaatcattacagcctccagcgctacccagggatctttaacagtaccacctcagatgctttcctacagtccaagatgcggaatattttctctgggagattgacagcaatcgaactgtttgacatactggatcactatactaagaactgtgacctgatggttggcaaccatgccctgatccagggtctgaagaaagaaaaatttgacctgctgctggtggaccctaatgatatgtgtggatttgtgatagctcatcttttaggggttaaatatgctgtattttcaactggcctttggtatcctgctgaagtgggtgctcctgctccattagcatacgtcccagagtttaactcactcctcacagaccgcatgaacttgctgcaaaggatgaaaaataccggtgtttacctcatttccagattaggggtcagctttctggttcttcccaaatatgaaaggataatgcagaagtacaacctgctgccggagaagtccatgtatgatttggttcatgggtccagcctgtggatgctgtgtactgacgtagcactggaattcccaagacccactctgcctaatgttgtttatgtaggaggaatcctaaccaaaccagccagcccactaccagaagatctccaaagatgggtaaatggtgctaatgaacatggctttgtcttggtgtcttttggagctggtgtcaagtatctgtcagaagacattgctaacaaactggcaggagctctggggagattgcctcaaaaagtgatttggaggttttctggacccaaaccaaagaatctaggaaacaacactaaactcatagaatggttaccacaaaatgacctgcttgggcattcaaagattaaagccttcctgagccatggtggtttgaacagtatttttgaaactatgtatcatggtgtgcctgtagtgggaattccactctttggagaccattatgatactatgaccagagtacaggcaaaaggcatggggatattgctagaatggaagacagttactgaaaaagagctctatgaagcactagtgaaggttatcaataatcccagctaccgtcagagggctcagaagctttcggaaattcacaaggatcaacctggtcaccctgtcaatcgaactatctattggatagattatattattcgtcacaatggagcccatcacctacgtgccgctgtccatcagatctccttttgtcagtattttttactggatattgcctttgtgcttttgcttggtgctgccttgttatactttctcttgtcttgggtgacaaaatttatctacagaaaaatcaaaagtctgtggtctagaaataagcatagcacagttaatggacattaccacaatggaatcctcaatggcaagtacaaaagaaatggccatattaaacatgaaaagaaagtgaaatgagccaacagcccaggtgatagaaataaattggttcactcattgaatttttattgctattatttagtctaacagctactaaaagtaaaacatcagtaaacaattctaacatgcccttatgagactactaatgaaattctgtggaattaagatggctgtaaaaagcacaaacctaaaatgcagaaatgtattttattcaaatactgatgtagagagttttggcactgaaccttttagaagccttaattatttaaatcaattcagtgactgtgtcagaccttagttttaaatcttgatatgtgcgtgtccc

SEQ ID NO: 6333 - DNA, 2114 bp, Homo sapiens
aggaattccggtggccggccactcccgtctgctgtgacgcgcggacagagagctaccggtggacccacggtgcctccctccctgggatctacacagaccatggccttgcaacggctcgacccctgttggtcctgtggggaccgccctggcagcctcctgttcctgctcttcagcctcggatgggtgcatcccgcgaggaccctggctggagagacagggacggagtctgcccccctggggggagtcctgacaaccccccataacatttccagcctctcccctcgccaactccttggcttcccgtgtgcggaggtgtccggcctgagcacggagcgtgtccgggagctggctgtggccttggcacagaagaatgtcaagctctcaacagagcagctgcgctgtctggctcaccggctctctgagccccccgaggacctggacgccctcccattggacctgctgctattcctcaacccagatgcgttctcggggccccaggcctgcacccgtttcttctcccgcatcacgaaggccaatgtggacctgctcccgaggggggctcccgagcgacagcggctgctgcctgcggctctggcctgctggggtgtgcgggggtctctgctgagcgaggctgatgtgcgggctctgggaggcctggcttgcgacctgcctgggcgctttgtggccgagtcggccgaagtgctgctaccccggctggtgagctgcccgggacccctggaccaggaccagcaggaggcagccagggcggctctgcagggcgggggacccccctacggccccccgtcgacatggtctgtctccacgatggacgctctgcggggcctgctgcccgtgctgggccagcccatcatccgcagcatcccgcagggcatcgtggccgcgtggcggcaacgctcctctcgggacccatcctggcggcagcctgaacggaccatcctccggccgcggttccggcgggaagtggagaagacagcctgtccttcaggcaagaaggcccgcgagatagacgagagcctcatcttctacaagaagtgggagctggaagcctgcgtggatgcggccctgctggccacccagatggaccgcgtgaacgccatccccttcacctacgagcagctggacgtcctaaagcataaactggatgagctctacccacaaggttaccccgagtctgtgatccagcacctgggctacctcttcctcaagatgagccctgaggacattcgcaagtggaatgtgacgtccctggagaccctgaaggctttgcttgaagtcgacaaagggcacgaaatgagtcctcaggctcctcggcggcccctcccacaggtggccaccctgatcgaccgctttgtgaagggaaggggccagctagacaaagacaccctagacaccctgaccgccttctaccctgggtacctgtgctccctcagccccgaggagctgagctccgtgccccccagcagcatctgggcggtcaggccccaggacctggacacgtgtgacccaaggcagctggacgtcctctatcccaaggcccgccttgctttccagaacatgaacgggtccgaatacttcgtgaagatccagtccttcctgggtggggcccccacggaggatttgaaggcgctcagtcagcagaatgtgagcatggacttggccacgttcatgaagctgcggacggatgcggtgctgccgttgactgtggctgaggtgcagaaacttctgggaccccacgtggagggcctgaaggcggaggagcggcaccgcccggtgcgggactggatcctacggcagcggcaggacgacctggacacgctggggctggggctacagggcggcatccccaacggctacctggtcctagacctcagcgtgcaagagaccctctcggggacgccctgcctcctaggacctggacctgttctcaccgtcctggcactgctcctagcctccaccctggcctgagggccccactcccttgctggccccagccctgctggggatccccgcctggccaggagcaggcacgggtgatccccgttccaccccaagagaactcgcgctcagtaaacgggaacatgccccctgcagac

SEQ ID NO: 6334 - DNA, 1383 bp, Homo sapiens; identical to SEQ ID NO: 250

SEQ ID NO: 6335 - DNA, 1977 bp, Homo sapiens; identical to SEQ ID NO: 3831
  misc_feature (1)..(1977): n=a,t,g or c

SEQ ID NO: 6336 - DNA, 2814 bp, Homo sapiens
gacaggccggggttactgtggcgaccacgagagcagctttggcgctatggaggagcccggggctacccctcaaccgtatttggggctgctcctggaggagctacgcagggttgtggcagcactgcctgaaggtatgagaccagattctaatctttatggttttccatgggaattggtgatatgtgcagctgttgttggattttttgctgttctcttttttttgtggagaagttttagatcggttaggagtcggctttatgtgggacgagagaaaaagcttgctctaatgctttctggactaattgaagaaaaaagtaaactacttgaaaaatttagccttgttcaaaaagagtatgaaggctatgaagtagagtcatctttaaaggatgccagctttgagaaggaggcaacagaagcacaaagtttggaggcaacctgtgaaaagctgaacaggtccaattctgaacttgaggatgaaatactctgtctagaaaaagagttaaaagaagagaaatccaaacattctgaacaagatgaattgatggcggatatttcaaaaaggatacagtctctagaagatgagtcaaaatccctcaaatcacaagtagctgaagccaaaatgaccttccagatatttcaaatgaatgaagaacgactgaagatagcaataaaagatgctttgaatgaaaattctcaacttcaggaaagccagaaacagcttttgcaagaagctgaagtatggaaagaacaagtgagtgaacttaataaacagaaagtaacatttgaagactccaaagtacatgcagaacaagttctaaatgataaagaaagtcacatcaagactctgactgaacgcttgttaaagatgaaagattgggctgctatgcttggagaagacataacggatgatgataacttggaattagaaatgaacagtgaatcggaaaatggtgcttacttagataatcctccaaaaggagctttgaagaaactgattcatgctgctaagttaaatgcttctttaaaaaccttagaaggagaaagaaaccaaatttatattcagttgtctgaagttgataaaacaaaggaagagcttacagagcatattaaaaatcttcagactcaacaagcatctttgcagtcagaaaacacacattttgaaaatgagaatcagaagcttcaacagaaacttaaagtaatgactgaattatatcaagaaaatgaaatgaaactccacaggaaattaacagtagaggaaaattatcggttagagaaagaagagaaactttctaaagtagatgaaaagatcagccatgccactgaagagctggagacctatagaaagcgagccaaagatcttgaagaagaattggagagaactattcattcttatcaagggcagattatttcccatgagaaaaaagcacatgataattggttggcagctcggaatgctgaaagaaacctcaatgatttaaggaaagaaaatgctcacaacagacaaaaattaactgaaacagagcttaaatttgaacttttagaaaaagatccttatgcactcgatgttccaaatacagcatttggcagaggctcacgaggcccagggaatcctctggaccatcagattaccaatgaaagaggagaatcaagctgtgataggttaaccgatcctcatagggctccctctgacactgggtctctgtcacctccatgggaccaggaccgtaggatgatgtttcctccgccaggacaatcatatcctgattcagcccttcctccacaaaggcaagacagattttgttctaattctggtagactgtctggaccagcagaactcagaagttttaatatgccttctttggataaaatggatgggtcaatgccttcagaaatggaatccagtagaaatgataccaaagatgatcttggtaatttaaatgtgcctgattcatctctccctgctgaaaatgaagccactggccctggctttgttcctccacctcttgctccaatcagaggtccattgtttccagtggatgcaagaggcccattcttgagaagaggacctcctttccccccacctcctccaggagccatgtttggagcttctcgagattattttccaccaagggatttcccaggtccaccacctgctccatttgcaatgagaaatgtctatccaccgaggggttttcctccttaccttcccccaagacctggatttttccccccacccccacattctgaaggtagaagtgagttcccctcaggtttgattccaccttcaaatgagcctgctactgaacatccagaaccacagcaagaaacctgacaatatttttgctctcttcaaaagtaattttgactgatctcattttcagtttaagtaactgctgttacttaagtgattacacttttgctcaaattgaagcttaatggaattataattctcaggatagtattttgtaaataaagatgatttaaatatgaatcttatgagtaaattatttcaattttattttagacggtataactatttcaatttgattaatccactattatataaacaatagtgggagttttatatatgtaatctttcaggtggggaggctttaaattctgaagtctgtgtctttatgccaagaactgtatttactgtggttgtggacaaatgtgaaagtaactttatgcttaaataaattatagttgatttaaagatttgtttggcattgataataataaaatcagtagtttttctataaaaaaaaaaaaaaaaaaaaaaaaaaaaaaaaaaaaaaaaaaaaaaaaaaaaaa

SEQ ID NO: 6337 - DNA, 1915 bp, Homo sapiens; identical to SEQ ID NO: 5404

SEQ ID NO: 6338 - DNA, 1195 bp, Homo sapiens
cacgaggcggattcttggcgccggagaagaggcagggtcaccctctctccacgtcagagacctgactgtggagatggcggctcagaagataaacgaggggctggaacacctcgccaaagcagagaaatacctgaaaactggttttttaaaatggaagccagattatgacagtgccgcttctgaatatggaaaagcagctgttgcttttaaaaatgccaaacagtttgagcaagcaaaagatgcctgcctgagggaagctgttgcccatgaaaataatagggctctttttcatgctgccaaagcttatgagcaagctggaatgatgttgaaggagatgcagaaactaccagaggccgttcagctaattgagaaggccagcatgatgtatctagaaaacggcaccccagacacagcagccatggctttggagcgagctggaaagcttatagaaaatgttgatccagagaaggctgtacagttatatcaacagacagctaatgtgtttgaaaatgaagaacgcttacgacaggcagttgaattactaggaaaagcctccagactactagtacgaggacgtaggtttgatgaggcggcactctctattcagaaagaaaaaaatatttataaggaaattgagaattatccaacttgttataagaaaacaattgctcaagtcttagttcatctacacagaaatgactatgtagctgcagaaagatgtgtccgggagagctatagcatccctgggttcaatggcagtgaagactgtgctgccctggaacagcttcttgaaggttatgaccagcaagaccaagatcaggtgtcagatgtctgcaactcaccgcttttcaagtacatggacaatgattatgctaagctgggcctgagtttggtggttccaggagggggaatcaagaagaaatcacctgcaacaccacaggccaagcctgatggtgtcactgccacggctgctgatgaagaggaagatgaatactcaggaggactatgctagtattttgcttgctgaaaagaaaagggaaacaaaggtaaaatcctgacatgccatttcaaggacttgggaatagattagggatatccgtacttcattacagtcatgattttggatcctaataaagactagtttttagttaccatcttcccaaatcaaaaaaaaaaaaaaaaaaaaaaaaaaaaa

SEQ ID NO: 6339 - DNA, 2302 bp, Homo sapiens
gttcctcgtgccaacgtgtcttgtaaggtgcggctagaaactggggacatggcagcgcctggcccagcgctctgcctcttcgacgtggatgggaccctcaccgccccgcggcagaaaattaccaaagaaatggatgacttcctacaaaaattgaggcagaagatcaaaatcggagtggtaggcggatcggactttgagaaagtgcaggagcaactgggaaatgatgtggttgaaaaatacgattatgtgtttccagaaaatggcttggtagcatacaaagatgggaaactcttgtgtagacagaatattcaaagtcatctgggtgaggccctaatccaagatttaatcaactactgtctgagctacattgcgaaaattaaactcccgaagaagaggggtactttcattgaattccgaaatgggatgttaaacgtgtcccctattggaagaagctgcagccaagaagaacgcattgagttctacgaactcgataaaaaagaaaatataagacaaaagtttgtagcagatctacggaaagagtttgctggaaaaggcctcacgttttccataggaggccagatcagctttgatgtctttcctgatggatgggacaagagatactgtctgcgacatgtggaaaatgacggttataagaccatttatttctttggagacaaaactatgccaggtggcaatgaccatgagatcttcacagaccccagaaccatgggctactccgtgacagcgcctgaggacacgcgcaggatctgtgaactgctgttctcctaacgtgggagcgggaggggcggggtcccggctgacaagcagcatagggcattcggtggccagagccgagggtcctcccacacgtgctcacccacccgcagcctaggcaggctctgcatgctatgccaggcatgtgccgtctggacttccacctccagtgccagaaacttccagaaagaaggagaaactcttgtcaagaatggcccagaggaatgcctcgcacaaaaggtcttccccacccacccccagccccctagtctaatacccaccctgatacgtgcaatcatgtagttttggcggaaatttccccatcattctaggatgatacagaaagaaaactgtgcctggaccctccctcttggtgggtctgtggaaacataagcggtttttttaatgggcccctgcatcaataccaaacatgggggtttggtaatgagaaaccaggacaggccatctgcagtgacccagcccaggacgaagtttacaaacacctcctggaacgaagctcccgcctgcatgtcaccttgatgggggctgtgagtggggcagtgtgatacccagtgactagacgcactctgcgttttcccgtgtttggggctgaggcctgctggacagatggctggccaagtgggagcagaccctagggagtttgcacctcggctgggccggattcggaccggctctgtgttcactacactcagaatagcctgctgcttctctgtctccgagaccggagtacttgggaacaacagctgggctggagagttggtgctggcaaaacagtccttcccctggggccggttcttacccaggtccagagaaaccaacgcgggatgtcagacttcaccaaaaggactttctggttgcccctggctggcttcctggaggcgttcgcctctagtttctcagggatggagcgagagcccagccagagaacagtaagaggagctgctctcctatctgcactcacccaggccttcacccagactttaccgcggaggcggctgagtgcagctacagctaggtccgcgtccctcactcttttcatcttctgcacgttcttcgtgaaactggaaggatcccgggtctcagctagaacacggtggaagagaactttcctaggaaacggttcatgtgtcacttttcaggatgtggaaacactgagccatacaccctccattgcttggtgctggggttgtgtggcctccactgggcacttgccgacctgagtctggggccaggggagcccaggctgccctgcactcctgcctcccagcccacagccaggtgctttcatcacagctaaacctggttccctccaaacctcccagccactcgggcttgtaactgtctgagccccggatccggtggggtgaaagcagccagctcatcccagtgactcacaggacacagccatccagcggcatctttccttgtcgaatgatactgtaatgaccttccaaagtgaagagtagcacattaaagtgattttattgtttaaaaaaaaaaaaaaaaa

SEQ ID NO: 6340 - DNA, 1952 bp, Homo sapiens; identical to SEQ ID NO: 1652

SEQ ID NO: 6341 - DNA, 401 bp, Homo sapiens
  misc_feature (1)..(401): n=a,t,g or c
tgcctaacttaaaaattgccatgtgtcaaaatcatggttttgtaattgctaaggcatgatatgtcaggttatttgaatataattactttttgaagtaattgtgaccacaaaacatcttttttacatgaaggagctgtgtatcatttgaaattactcaaatgatgtcttgctctgaggcataaatcccaggtacttagtgtttttaataatatggtgccactgcaggatttgggggcggtggggaagaacaagcataatggtagggggaggcttggctgaaactaaccactgagtgaattgcactgcaggttttacttaacgggaattccttatttgggatgtcaagagggcagctgcaaactgaaaaacaancagtaaatgtctttgttttatgtattgta

SEQ ID NO: 6342 - DNA, 376 bp, Homo sapiens; identical to SEQ ID NO: 5790
  misc_feature (1)..(376): n=a,t,g or c

SEQ ID NO: 6343 - DNA, 476 bp, Homo sapiens
  misc_feature (1)..(476): n=a,t,g or c
ttttttttttgcaggtgactgaaactttaatgcacctagggattgaccacaacatttacaaatcagtgttactgcattggtttttcaaagattagctacatttataaactttattttaaaagtttcacaaagttaaatttccttaacacttcaacaggaatctaactctttacagtctatcaaaatggtaatattttaccttttttttttttttttttttttttttaaagcactggngctcttcttaagtgaaatgttaacacagggctcaatacataaaagagaaagtgaagttgttccatttggggggtcccataaggggcctcatgtttccctaggngttaccccttcagacacagcacagcctacaaagccatggaattaaaatattaacaatgaatgcataaagatttcactgacaaataaaaaccagggagtgcattcagtgaccacaactttctaagcttctgcttttc

SEQ ID NO: 6344 - DNA, 380 bp, Homo sapiens
cggtttgcataaagcatttatttacagcagtacttgcaacaaagtaagtgctatataagtatgagccatttttattaccataagcaaagctttctacattggttgacttgacaaacttctggcaaactttttttctctttggaaatcattcagcaggcactgtttacatcctttcgctgccatatctctagctttcactaaatctgccacacattcctgccttctctgttgacctcgcttggattctcctacatgcttccagttaagccagccagaggattttcctgtctctgggaatcttgtggaaaatcttgcattttggggcaccttctccttcagttataatgatataccttaaaagttttacatttacaaatgtc

SEQ ID NO: 6345 - DNA, 480 bp, Homo sapiens; identical to SEQ ID NO: 5310
  misc_feature (1)..(480): n=a,t,g or c

SEQ ID NO: 6346 - DNA, 406 bp, Homo sapiens; identical to SEQ ID NO: 3303

SEQ ID NO: 6347 - DNA, 449 bp, Homo sapiens
  misc_feature (1)..(449): n=a,t,g or c
tttttttttttttcaaaaaagtaggcaagtactttgctttattgacatcaaatggaacttcttgtccctcacgcagtccacacaacagtaaaggcacaatgaggcatattaaaacatagccagtttcaacagcttggatatttcctgccatggaaaagtatcctgcccacagattcacattaacatacatggtacattaatatcaatctctatcatataccaggccacggtacatgtttgcacgcagggtcacgttctgcaacaaacttattctaataacagtattcagaaggcaccctatgggacacaggtgacagttgaagttacgaggctagatgggccacatcttttacatccaagaaccgccctggggncacaccccaaactggctngaggtgcggaggcnggttctgcaaagcagggtcagaaacactccccccataccccaa

SEQ ID NO: 6348 - DNA, 430 bp, Homo sapiens
  misc_feature (1)..(430): n=a,t,g or c
gttgacctgttatttattgtgcacccattggnagtngcgcctagccctaggcctggcggnangacccaaacatggcctccaagggccaaccttactttgtggaggtgcaagccccagagctggttacaagcatgggnnnggaggagggtggcctagcaggaaggctggggaggcagtgtgtcagccggcacagcnagcgggtagcagaggccccctcttggcgggcagctacttgcacacttggctgaacagagacaatggtggctggtccctccggcccagcctccttcctacaggcagagccccaagtccatgagtctccggaacctccctcagagaacaagcccagctgggaggctgccagagggcaggatgaggggatttcccaggggagagcagcagagaccctctgagctgccagagatgggga

SEQ ID NO: 6349 - DNA, 445 bp, Homo sapiens
  misc_feature (1)..(445): n=a,t,g or c
gagaccaagtttcatactcttgttgcccaggccggagtgcaatggtgcgatcttggctcactgcaacctctgcctcccgggtttacgttctttaatgtcctggttatcttctccctaccgcttttatctgaacctttcctttcgtctctactaacttgtctctctgcagctcaatctggattatatttccaacagtttgtcctcagtgacgggctttgttctggaagggtatagtggccagctagcatgaacaacgatagaaccctgtggctggttaccgcttccttaagtcacaaagtcatccctttctggcctgttggagcaaaaattgttgccctgggacacttttaaaaacttttnccttttgaacaggctgggcaatggttaaaccttcntgccaaggcggagaancaatgggaactcgttggccgaaatttcttgggaa

SEQ ID NO: 6350 - DNA, 476 bp, Homo sapiens; identical to SEQ ID NO: 5381
  misc_feature (1)..(476): n=a,t,g or c

SEQ ID NO: 6351 - DNA, 241 bp, Homo sapiens; identical to SEQ ID NO: 5713

SEQ ID NO: 6352 - DNA, 562 bp, Homo sapiens; identical to SEQ ID NO: 5382
  misc_feature (1)..(562): n=a,t,g or c

SEQ ID NO: 6353 - DNA, 174 bp, Homo sapiens; identical to SEQ ID NO: 5925

SEQ ID NO: 6354 - DNA, 401 bp, Homo sapiens; identical to SEQ ID NO: 4799

SEQ ID NO: 6355 - DNA, 1558 bp, Homo sapiens; identical to SEQ ID NO: 6000

SEQ ID NO: 6356 - DNA, 1520 bp, Homo sapiens
gaattccgggggggggtcccttccgatcctccctcctgacgccccccccagcagccccctcccccaccattgaaagccatgaattttgaatttgagagggagattgggtttataaacagccagccgtcgctcgccgagtgtctgacttccttccccgctgtcttggagacatttcaaacttcatcaatcaaggagtcgacattaattcctcctcctcctcctttcgagcaaaccttccccagcctccagcccggcgcctccacccttcagagacccaggagccaaaagcgagccgaagatgggcctgctctgccgccgccaccgccgccgccactccccgctgcccccccggcccccgagttcccttggatgaaagagaagaaatccgccaagaaacccagccaatccgccacgtctccttctccggccgcctccgccgttccggcctccggggtcggatcgcctgcagatggcctgggactgccggaggctggtggcggcggggcgcgcaggctgcgcacggcttacaccaacacgcagctgctggaactggagaaggaattccactttaataagtacctgtgccggccacgccgcgtcgagatcgcggccttgctggacctcaccgaaaggcaggtcaaagtctggtttcagaaccggcgcatgaagcacaagcggcagacgcagcaccgagagccgccggatggggagcctgcctgcccgggagccctggaggacatctgcgaccctgccgaggaacccgcggccagcccgggcggcccctccgcctcgcgggcggcgtgggaagcctgctgtcacccgccggaggtggtgccgggggccttaagcgcggacccccggcctttagccgttcgcttagagggcgcaggcgcgtcgagtcccggctgcgcgctgcgcggggccggcgggctggagcccgggccattgccagaagacgtcttctcggggcgccaggattcacctttccttcccgacctcaacttcttcgcggccgactcctgtctccagctatccggaggcctctcccctagcctacagggttctctcgacagcccggtccctttttccgaggaagagctggattttttcaccagtacgctctgtgccatcgacctgcagtttccctaacctgtttcctcctcccggtcctttcgacccccgcgctccttggccgtctactggaaaaatcgagcctctcccaccctcagtcgcatagacttatgtgttttgctaaaattcaggtattactgaattagcgtttaatccacttcctttcttcttcttctaaaatattgggcactcggttatcttttaaaattcacacagaaaaattccgtttggtagactccttccaatgaaatctcaggaataattaaactctagggggactttcttaaaaataactagagggacctattttcctcttttttatgttttagactgtagattatttattaaaattctttaataataggaaaaggggaaagtatttattgtac

SEQ ID NO: 6357 - DNA, 627 bp, Homo sapiens; identical to SEQ ID NO: 1056

SEQ ID NO: 6358 - DNA, 4244 bp, Homo sapiens; identical to SEQ ID NO: 4621

SEQ ID NO: 6359 - DNA, 583 bp, Homo sapiens
cccctgcaccccgcccggcatagcaccatgcctgcttgtcgcctaggcccgctagccgccgccctcctcctcagcctgctgctgttcggcttcaccctagtctcaggcacaggagcagagaagactggcgtgtgccccgagctccaggctgaccagaactgcacgcaagagtgcgtctcggacagcgaatgcgccgacaacctcaagtgctgcagcgcgggctgtgccaccttctgccttctctgccccaatgataaggagggttcctgcccccaggtgaacattaactttccccagctcggcctctgtcgggaccagtgccaggtggacacgcagtgtcctggccagatgaaatgctgccgcaatggctgtgggaaggtgtcctgtgtcactcccaatttctgaggtccagccaccaccaggctgagcagtgaggagagaaagtttctgcctggccctgcatctggttccagcccacctgccctcccctttttcgggactctgtattccctcttggggtgaccacagcttctccctttcccaaccaataaagtaaccactttcagcaaaaaaaaaaaaaaaa

SEQ ID NO: 6360 - DNA, 983 bp, Homo sapiens; identical to SEQ ID NO: 5432

SEQ ID NO: 6361 - DNA, 1285 bp, Homo sapiens
gggctgcctgtgacgcgcggcgcggtcggtcctgcctgtaacggcggcggcggctgctgctccagacacctgcggcggcggcggcgaccccgcggcgggcgcggagatgtggcccctggtagcggcgctgttgctgggctcggcgtgctgcggatcagctcagctactatttaataaaacaaaatctgtagaattcacgttttgtaatgacactgtcgtcattccatgctttgttactaatatggaggcacaaaacactactgaagtatacgtaaagtggaaatttaaaggaagagatatttacacctttgatggagctctaaacaagtccactgtccccactgactttagtagtgcaaaaattgaagtctcacaattactaaaaggagatgcctctttgaagatggataagagtgatgctgtctcacacacaggaaactacacttgtgaagtaacagaattaaccagagaaggtgaaacgatcatcgagctaaaatatcgtgttgtttcatggttttctccaaatgaaaatattcttattgttattttcccaatttttgctatactcctgttctggggacagtttggtattaaaacacttaaatatagatccggtggtatggatgagaaaacaattgctttacttgttgctggactagtgatcactgtcattgtcattgttggagccattcttttcgtcccaggtgaatattcattaaagaatgctactggccttggtttaattgtgacttctacagggatattaatattacttcactactatgtgtttagtacagcgattggattaacctccttcgtcattgccatattggttattcaggtgatagcctatatcctcgctgtggttggactgagtctctgtattgcggcgtgtataccaatgcatggccctcttctgatttcaggtttgagtatcttagctctagcacaattacttggactagtttatatgaaatttgtggcttccaatcagaagactatacaacctcctaggaaagctgtagaggaaccccttaatgcattcaaagaatcaaaaggaatgatgaatgatgaataactgaagtgaagtgatggactccgatttggagagtagtaagacgtgaaaggaatacacttctgtttaagcaccatggccttgatgattcactgttggggagaagaaacaagaaaagtaactggttgtcacctatgagacccttacgtgattgttagttaagtttttattcaaagcagctgtaatttagttaataaaataattatgatc

SEQ ID NO: 6362 - DNA, 3151 bp, Homo sapiens; identical to SEQ ID NO: 5870

SEQ ID NO: 6363 - DNA, 362 bp, Homo sapiens
gctcagcctccaaaggagccagcctctccccagttcctgaaatcctgagtgttgcctgccagtcgccatgagaacttcctaccttctgctgtttactctctgcttacttttgtctgagatggcctcaggtggtaactttctcacaggccttggccacagatctgatcattacaattgcgtcagcagtggagggcaatgtctctattctgcctgcccgatctttaccaaaattcaaggcacctgttacagagggaaggccaagtgctgcaagtgagctgggagtgaccagaagaaatgacgcagaagtgaaatgaactttttataagcattcttttaataaaggaaaattgcttttgaagtat

SEQ ID NO: 6364 - DNA, 1610 bp, Homo sapiens; identical to SEQ ID NO: 3119
  misc_feature (1)..(1610): n=a,t,g or c

SEQ ID NO: 6365 - DNA, 272 bp, Homo sapiens; identical to SEQ ID NO: 4443

SEQ ID NO: 6366 - DNA, 303 bp, Homo sapiens
  misc_feature (1)..(303): n=a,t,g or c
aacttctgaggttatttttatttttaaatttaacttcaatttctgtttatttaaattttaaaaattattcagattattaaattcatgttagtcttattgtgatcataacagtaggaactgtacagatgattggtagtggctctcaaatgttaaaatacatcagaataacatgggaaacctgctgaaatgcagttnccagcagacttggttttgtcatagcaattggtatttttaacaagcattccaaggattctgatgcagatcgtatcctgaccacactttgagaaaccattatttagtttc

SEQ ID NO: 6367 - DNA, 3923 bp, Homo sapiens
cggagctcgaaactgactggaaacttcagtggcgcggagactcgccagtttcaaccccggaaacttttctttgcaggaggagaagagaaggggtgcaagcgcccccacttttgctctttttcctcccctcctcctcctctccaattcgcctccccccacttggagcgggcagctgtgaactggccaccccgcgccttcctaagtgctcgccgcggtagccggccgacgcgccagcttccccgggagccgcttgctccgcatccgggcagccgaggggagaggagcccgcgcctcgagtccccgagccgccgcggcttctcgcctttcccggccaccagccccctgccccgggcccgcgtatgaatctcctggaccccttcatgaagatgaccgacgagcaggagaagggcctgtccggcgcccccagccccaccatgtccgaggactccgcgggctcgccctgcccgtcgggctccggctcggacaccgagaacacgcggccccaggagaacacgttccccaagggcgagcccgatctgaagaaggagagcgaggaggacaagttccccgtgtgcatccgcgaggcggtcagccaggtgctcaaaggctacgactggacgctggtgcccatgccggtgcgcgtcaacggctccagcaagaacaagccgcacgtcaagcggcccatgaacgccttcatggtgtgggcgcaggcggcgcgcaggaagctcgcggaccagtacccgcacttgcacaacgccgagctcagcaagacgctgggcaagctctggagacttctgaacgagagcgagaagcggcccttcgtggaggaggcggagcggctgcgcgtgcagcacaagaaggaccacccggattacaagtaccagccgcggcggaggaagtcggtgaagaacgggcaggcggaggcagaggaggccacggagcagacgcacatctcccccaacgccatcttcaaggcgctgcaggccgactcgccacactcctcctccggcatgagcgaggtgcactcccccggcgagcactcggggcaatcccagggcccaccgaccccacccaccacccccaaaaccgacgtgcagccgggcaaggctgacctgaagcgagaggggcgccccttgccagaggggggcagacagccccctatcgacttccgcgacgtggacatcggcgagctgagcagcgacgtcatctccaacatcgagaccttcgatgtcaacgagtttgaccagtacctgccgcccaacggccacccgggggtgccggccacgcacggccaggtcacctacacgggcagctacggcatcagcagcaccgcggccaccccggcgagcgcgggccacgtgtggatgtccaagcagcaggcgccgccgccacccccgcagcagcccccacaggccccgccggccccgcaggcgcccccgcagccgcaggcggcgcccccacagcagccggcggcacccccgcagcagccacaggcgcacacgctgaccacgctgagcagcgagccgggccagtcccagcgaacgcacatcaagacggagcagctgagccccagccactacagcgagcagcagcagcactcgccccaacagatcgcctacagccccttcaacctcccacactacagcccctcctacccgcccatcacccgctcacagtacgactacaccgaccaccagaactccagctcctactacagccacgcggcaggccagggcaccggcctctactccaccttcacctacatgaaccccgctcagcgccccatgtacacccccatcgccgacacctctggggtcccttccatcccgcagacccacagcccccagcactgggaacaacccgtctacacacagctcactcgaccttgaggaggcctcccacgaagggcgacgatggccgagatgatcctaaaaataaccgaagaaagagaggaccaaccagaattccctttggacatttgtgtttttttgtttttttattttgttttgttttttcttcttcttcttcttccttaaagacatttaagctaaaggcaactcgtacccaaatttccaagacacaaacatgacctatccaagcgcattacccacttgtggccaatcagtggccaggccaaccttggctaaatggagcagcgaaatcaacgagaaactggactttttaaaccctcttcagagcaagcgtggaggatgatggagaatcgtgtgatcagtgtgctaaatctctctgcctgtttggactttgtaattatttttttagcagtaattaaagaaaaaagtcctctgtgaggaatattctctattttaaatatttttagtatgtactgtgtatgattcattaccattttgaggggatttatacatatttttagataaaattaaatgctcttatttttccaacagctaaactactcttagttgaacagtgtgccctagcttttcttgcaaccagagtatttttgtacagatttgctttctcttacaaaaagaaaaaaaaaatcctgttgtattaacatttaaaaacagaattgtgttatgtgatcagttttgggggttaactttgcttaattcctcaggctttgcgatttaaggaggagctgccttaaaaaaaaataaaggccttattttgcaattatgggagtaaacaatagtctagagaagcatttggtaagctttatgatatatatattttttaaagaagagaaaaacaccttgagccttaaaacggtgctgctgggaaacatttgcactcttttagtgcatttcctcctgcctttgcttgttcactgcagtcttaagaaagaggtaaaaggcaagcaaaggagatgaaatctgttctgggaatgtttcagcagccaataagtgcccgagcacactgcccccggttgcctgcctgggccccatgtggaaggcagatgcctgctcgctctgtcacctgtgcctctcagaacaccagcagttaaccttcaagacattccacttgctaaaattatttattttgtaaggagaggttttaattaaaacaaaaaaaaattcttttttttttttttttttccaattttaccttctttaaaataggttgttggagctttcctcaaagggtatggtcatctgttgttaaattatgttcttaactgtaaccagtttttttttatttatctctttaatcttttttattattaaaagcaagtttctttgtattcctcaccctagatttgtataaatgcctttttgtccatcccttttttctttgttgtttttgttgaaaacaaactggaaacttgtttctttttttgtataaatgagagattgcaaatgtagtgtatcactgagtcatttgcagtgttttctgccacagacctttgggctgccttatattgtgtgtgtgtgtgggtgtgtgtgtgttttgacacaaaaacaatgcaagcatgtgtcatccatatttctctacatcttctcttggagtgagggaggctacctggaggggatcagcccactgacagaccttaatcttaattactgctgtggctagagagtttgaggattgctttttaaaaaagacagcaaacttttttttttatttaaaaaaagatatattaacagttttagaagtcagtagaataaaatcttaaagcactcataatatggcatccttcaatttctgtataaaagcagatctttttaaaaaagatacttctgtaacttaagaaacctggcatttaaatcatattttgtctttaggtaaaagctttggtttgtgttcgtgttttgtttgtttcacttgtttccctcccagccccaaaccttttgttctctccgtgaaacttacctttccctttttctttctctttttttttttgtatattattgtttacaataaatatacattgcattaaaaagaaa

SEQ ID NO: 6368 - DNA, 580 bp, Homo sapiens; identical to SEQ ID NO: 2660
  misc_feature (1)..(580): n=a,t,g or c

SEQ ID NO: 6369 - DNA, 1721 bp, Homo sapiens
gaattccctggctgcttgaatctgttctgccccctccccacccatttcaccaccaccatgacaccgggcacccagtctcctttcttcctgctgctgctcctcacagtgcttacagttgttacaggttctggtcatgcaagctctaccccaggtggagaaaaggagacttcggctacccagagaagttcagtgcccagctctactgagaagaatgctgtgagtatgaccagcagcgtactctccagccacagccccggttcaggctcctccaccactcagggacaggatgtcactctggccccggccacggaaccagcttcaggttcagctgccacctggggacaggatgtcacctcggtcccagtcaccaggccagccctgggctccaccaccccgccagcccacgatgtcacctcagccccggacaacaagccagccccgggctccaccgcccccccagcccacggtgtcacctcggccccggacaccaggccgcccccgggctccaccgcccccccagcccacggtgtcacctcggccccggacaccaggccgcccccgggctccaccgcgcccgcagcccacggtgtcacctcggccccggacaccaggccggccccgggctccaccgcccccccagcccatggtgtcacctcggccccggacaacaggcccgccttggcgtccaccgcccctccagtccacaatgtcacctcggcctcaggctctgcatcaggctcagcttctactctggtgcacaacggcacctctgccagggctaccacaaccccagccagcaagagcactccattctcaattcccagccaccactctgatactcctaccacccttgccagccatagcaccaagactgatgccagtagcactcaccatagcacggtacctcctctcacctcctccaatcacagcacttctccccagttgtctactggggtctctttctttttcctgtcttttcacatttcaaacctccagtttaattcctctctggaagatcccagcaccgactactaccaagagctgcagagagacatttctgaaatgtttttgcagatttataaacaagggggttttctgggcctctccaatattaagttcaggccaggatctgtggtggtacaattgactctggccttccgagaaggtaccatcaatgtccacgacgtggagacacagttcaatcagtataaaacggaagcagcctctcgatataacctgacgatctcagacgtcagcgtgagtgatgtgccatttcctttctctgcccagtctggggctggggtgccaggctggggcatcgcgctgctggtgctggtctgtgttctggttgcgctggccattgtctatctcattgccttggctgtctgtcagtgccgccgaaagaactacgggcagctggacatctttccagcccgggatacctaccatcctatgagcgagtaccccacctaccacacccatgggcgctatgtgccccctagcagtaccgatcgtagcccctatgagaaggtttctgcaggtaatggtggcagcagcctctcttacacaaacccagcagtggcagccacttctgccaacttgtaggggcacgtcgccctctgagctgagtggccagccagtgccattccactccactcagggctctctgggccagtcctcctgggagcccccaccacaacacttcccaggcatggaattcc

SEQ ID NO: 6370 - DNA, 5938 bp, Homo sapiens; identical to SEQ ID NO: 4634

SEQ ID NO: 6371 - DNA, 2727 bp, Homo sapiens
cacgagaagacaggaggaagaaagggagagagggccaggcagtcgcactgtgaacagaacaggagaaggcgaagcggggcaaagttccctgcccaccgacgccagcctgcttggatgacttgcctcgtttcataattcacttactgtctgcaccagccggcctcagcctggctggaccctgctgcctgtgtggcccggagccagaggcccccacactcccagctgctcttctacagatgccatcaacgagcaggactctgggtggctccactgtctaagcctggagagtcaccgccgagggatgaggacgcgccagcccgggggaacgcgccagctgctttcgcggccccaagcgcgcagtgcccagcagccgcgccgagcctgacacgctgtcctctcccctcgcgcacagggctctgcgagtgacccggcgggcgagctccgtgctgcatggaacggctgcagaagcaaccacttacctcccccgggagcgtgagcccctcccgagattccagtgtgcctggctctccctccagcatcgtggccaagatggacaatcaggtgctgggctacaaggacctggctgccatccccaaggacaaggccatcctggacatcgagcggcccgacctcatgatctacgagcctcacttcacttattccctcctggaacacgtggagctgcctcgccagcgcgagcgctcgctgtcacccaaatccacatcccccccaccatccccagaggtgtgggcggacagccggtcgcctggaatcatctctcaggcctcggcccccagaaccactggaaccccccggaccagcctgccccatttccaccaccctgagacctcccgcccagattccaacatctacaagaagcctcccatctataagcagagagagtccgtgggaggcagccctcagaccaagcacctcatcgaggatctcatcatcgagtcatccaagtttcctgcagcccagcccccagaccccaaccagccagccaaaatcgaaaccgactactggccatgccccccgtctctggctgttgtggagacagaatggaggaagcggaaggcgtctcggaggggagcagaggaagaggaggaggaggaagatgacgactctggagaggagatgaaggctctcagggagcgtcagagagaggaactcagtaaggttacttccaacttgggaaagatgatcttgaaagaagagatggaaaagtcattgccgatccgaaggaaaacccgctctctgcctgaccggacacccttccatacctccttgcaccagggaacgtctaaatcttcctctctcccccgctatggcaggaccaccctgagccggctacagtccacagagttcagcccatcagggagtgagactggaagcccaggcctgcagaacggagagggccagagggggaggatggaccgggggaactccctgccctgtgtgctggagcagaagatctatccctatgaaatgctagtggtgaccaacaaggggcgaaccaagctgccaccgggggtggatcggatgcggcttgagaggcatctgtctgccgaggacttctcaagggtatttgccatgtcccctgaagagtttggcaagctggctctgtggaagcggaatgagctcaagaagaaggcctctctcttctgatggcccccacctgctccgggacggcccccttacccctgctgcttcagggtttttccccggcgggttgggaggggcaggaggtggggtggaaatagggtgggctcctttcctcaggtagagtggggggccaaaacctctgcagtccccggcagtgagctatggactttcttccccctcacgaggctgggggcctcctgctctcgtccctggccctccctgtacagggcaaagccagtctgggctctggcacacagagttcatgtttgccgccctctccctgcccctcaccccagaggtgagaggaatgaggggcattggtggttaggccggttggctgtcttgaacagctggagggaagatgcaggggtgggaagcggccaggcagaaagagctccaggctcttgtgtcgcccacccagccctcccatactcactcctgacagctttcctgcactgcagcttcctgctcctctgactctagtgggaacaggccccagctcagcctccgcgagggaggtcacccctccacttcagcttgccctgacctccgctcgcaaaccccgagcttccaagccttttgctccagccctgcggcttccccagaagcctgggcttagggtggagatgccgcctacccgatcctggccctccacctgcctccaggccacgaaatgggaattccagcactaagccaggcaccgggcagaagctgggccttccgcctcccttggatggggtcaagaggccaggcctggcacattttggagtgtcctggctaccagctctcacacctacacccacgcaccccctcacacactatgctctctcaagaatgtaatttattggggcccccccagctgctttcctcacctgcccctgccctaccttacacccccagcttgacttctttccagtccacgtggatataatgatatctatatttttgcccaggtctgggtattgctcctgcccagaccctgacatccctttccactgtgtgtgtgaccatgctgggggagggggactctgcttggaattaaaaggttgctttgggtcccta

SEQ ID NO: 6372 - DNA, 184 bp, Homo sapiens
gtggcgacgctgtgacgcttctgtttttcagaacatctgttccccaaatcataactgccaagttcttcgtgtacttggaatctccttgggttacttgtagctggtgccatttctcctcatcaacccaaatcccgcttcccagatggaccttgccattgtctaggatatacttgtccatgacagg

SEQ ID NO: 6373 - DNA, 451 bp, Homo sapiens
  misc_feature (1)..(451): n=a,t,g or c
catgataatttagtttacttctgaatattttaaatattacgaaaacaagtataacagctttgttttcaaaactcttttgaggtatcagccattaaaagattaaggtttttgtaaaaaaaaaacacagtggtttattgaatacttacaacgtttacaccttcaatattaattaaattccatttagttttagaggacggaagtgcacaaaacaagtggctgtnggaaacatcttcaaagagggaacgaccacagatgaatggatagcactagataccgaccccaacggaaatgttagcggccctgttttctgctttgaaataaaactttataatacccaggaatatttatatccaaaggccaagtattaaagatacactttcacaaacggcactagtgcccactgnctttaatctggaagggggttgagttagggttggcggggggggcaacc

SEQ ID NO: 6374 - DNA, 379 bp, Homo sapiens; identical to SEQ ID NO: 3373

SEQ ID NO: 6375 - DNA, 382 bp, Homo sapiens; identical to SEQ ID NO: 2119

SEQ ID NO: 6376 - DNA, 343 bp, Homo sapiens
ctgatcagactctttttattgttttgttttttataaacaagtctcaggtggaaaaagaaagaaagggaggagctagctctctgccttctcagccaattgaaatcgtggaaaccaatgggcttcagctagccccactcatcactgctgggggggaaaagacatccctactccccttccccgtggcactcatgatattctcaatgccccaacaagggtcatcttggttcctctcggcgtttctgtcctggcctttggctctggctccggctctgactccgactccggctccggccagggccccgggagcccctagagctgctggagcccctgggaagagttgctg

SEQ ID NO: 6377 - DNA, 481 bp, Homo sapiens
tttttttttttaaaaaaagaaaacaatgtttattaggatattctggggtgagaggatggccaaagggactatgtacattctgtagtgcttgagcaataggctaacagaaaattcgaacatcacaaaaccacttccaaagtccatattgcaaaacttgtacttctacaggagatgttcttccaagggtgttggcaataaaggctgttgcaaaacagctatgtgaggcagccatgtgggagtgaccccaggagaatgctccggtgtcctctggaaagcagatacacaggacgatggacaaatgtgtcatcttctaccagtgggaagctcagtaaacacacaatataacatggagacccgcccgaagcctaactggaggcttctcaacaaagctcagtcgacccctcacccctgttccgaggagactgggtgtctgaacccctcactcaggaatgaattctaaaaataccctaaaaatcagaag

SEQ ID NO: 6378 - DNA, 427 bp, Homo sapiens; identical to SEQ ID NO: 3917

SEQ ID NO: 6379 - DNA, 443 bp, Homo sapiens
ggctgttaacattgttttatttcctttatacaaaaagtagaaatgacagaaaaaacactcttgacagaaacaataccactgacctgatctcatgaaggagctgagccaaatctgcccacattatggggaaagggaggttcaatcaacattagcaaatactcatgcaattgatgaaatataaaatggtatcagtggcttggtgaatgtcctgtgggtagggtgaatcaatctactcttaaaaaacgtacattttcccaatcatgcttttaaacggcatcttttaaaaaaacaagttatatatacagatatcaccccaaaatgaatcttttacagtctactactataaatttaaggcatcctgatattctgttcttctgctggtgaggcattgttttcatggttctctttccaaagaggatagtccagaaatttccaataatttc

SEQ ID NO: 6380 - DNA, 439 bp, Homo sapiens
ttttctttttcatgatctttatttatcctcgagacgcttggatccagtaagcgagtgacaatttcaagactgccagccatgcacctctgtatgtttttggcccaagcagcagccgtggccgtagtgccaaccctcacacgctagctacctcctcctgtgcttggagtggaaagtctgtggggttctctgtctggttctgcaagcttttcacaccatctcttcgctgtctgtctctatgctaggggtttcacacaactctacaccattgcattcatgcttgccgtatccctgactttctgcacaagtgcagggcagagatggcccttttgttttggtgagggagagagggaaacacttgggcacaaagaggggaagggactgtgaatcccagggagcaccctggccagatcccagcggtgttcgaatcccaggaccatct

SEQ ID NO: 6381 - DNA, 415 bp, Homo sapiens; identical to SEQ ID NO: 1716

SEQ ID NO: 6382 - DNA, 283 bp, Homo sapiens; identical to SEQ ID NO: 4494

SEQ ID NO: 6383 - DNA, 288 bp, Homo sapiens; identical to SEQ ID NO: 2132

SEQ ID NO: 6384 - DNA, 488 bp, Homo sapiens; identical to SEQ ID NO: 1970

SEQ ID NO: 6385 - DNA, 513 bp, Homo sapiens; identical to SEQ ID NO: 1974

SEQ ID NO: 6386 - DNA, 320 bp, Homo sapiens
tttttttttttgtggttataatgagctcaaagcctgtgccggtctggtctgtgaaaggtgaggcgaggtcaacaccccgggcagaagtcaggggggccactctagccatggcatcaggagtggtccaggcacatctctgggtcctgaggagcccccagcccagggtggctctgcctgaggcccaggtgtaaatcccaagtcttggggtctctgaggggcactgtcttcaaagggtcaactggcatgtgcagctcattgtactcatcctggccatcctcatcggagtttggttcaacatctccggattcaagcggctgaag

SEQ ID NO: 6387 - DNA, 398 bp, Homo sapiens; identical to SEQ ID NO: 1976

SEQ ID NO: 6388 - DNA, 2263 bp, Homo sapiens
gcacgagaagaatttaggaatttctgattcatttaaaggatttacaaattcatcaacccctgaaaactaaagcaaattgaacaggaaaaaaaaaaagaagatgggttttttaagtccaatatatgttattttcttcttttttggagtcaaagtacattgccaatatgaaacttatcagtgggatgaagactatgaccaagagccagatgatgattaccaaacaggattcccatttcgtcaaaatgtagactacggagttccttttcatcagtatactttaggctgtgtcagtgaatgcttctgtccaactaactttccatcatcaatgtactgtgataatcgcaaactcaagactatcccaaatattccgatgcacattcagcaactctaccttcagttcaatgaaattgaggctgtgactgcaaattcattcatcaatgcaactcatcttaaagaaattaacctcagccacaacaaaattaaatctcaaaagattgattatggtgtgtttgctaagcttccaaatctactacaacttcatctagagcataataatttagaagaatttccatttcctcttcctaaatctctggaaagactccttcttggttacaatgaaatctccaaactgcagacaaatgctatggatgggctagtaaacttgaccatgcttgatctctgttataattatcttcatgattctctgctaaaagacaaaatctttgccaaaatggaaaaactaatgcagctcaacctctgcagtaacagattagaatcaatgcctcctggtttgccttcttcacttatgtatctgtctttagaaaataattcaatttcttctatacccgaaaaatacttcgacaaacttccaaaacttcatactctaagaatgtcacacaacaaactacaagacatcccatataatatttttaatcttcccaacattgtagaactcagtgttggacacaacaaattgaagcaagcattctatattccaagaaatttggaacacctatacctacaaaataatgaaatagaaaagatgaatcttacagtgatgtgtccttctattgacccactacattaccaccatttaacatacattcgtgtggaccaaaataaactaaaagaaccaataagctcatacatcttcttctgcttccctcatatacacactatttattatggtgaacaacgaagcactaatggtcaaacaatacaactaaagacacaagttttcaggagatttccagatgatgatgatgaaagtgaagatcacgatgatcctgacaatgctcatgagagcccagaacaagaaggagcagaagggcactttgaccttcattattatgaaaatcaagaatagcaagaaactatataggtatacacttacgacttcacaaaacctatacttaatatagtaaatctaagtaaacatgtattactcaaagtaatatatttagaattatgtattagtataagatcagaattgaatttaagttgttggtgacatctgcatcatttcataggattagaacttactcaaaataatgtaaatctttaaaaatataaattagaatgacaagtgggaatcataaattaaacgttaatggtttcttatgctctttttaaatatagaaatatcatgttaaagaaagtgagtgtatcatttctattaacagtaatttttctaaaaatgaggaaggaagtagcattagcagtaaagacccacaggccacgaccctcctgatcactctgaggacaatatttaaatgacaggaaggtatattaatgtaacaagcattcatttaaggaatagaccattttctctgacctcttcttcaggaaagctttcacactggtatttgtgatctcaccattatgacatccatccccctagctcaccacatagcacatagaatgatatttttgatttgtaagaggccatccaggtactaaggacccaaggcatacagattcacaaaattaactaatctttttgcctcagaataccaaaacaacaaaattataaagctgttatttggacaactaaaaaacaccaaactatctcattgcaatttgtattttagcagatttcagcaactatcctaaacaatgttattgtgttccattttaactgggataaatgtttttgtaaaaatacaaccatagaaaggcctctttgttacaaaatgatttgcaaagaaataactgctttgtttgcaagattaaattagtgttggcaaaataaagttctaaagat

SEQ ID NO: 6389 - DNA, 407 bp, Homo sapiens; identical to SEQ ID NO: 3657

SEQ ID NO: 6390 - DNA, 3388 bp, Homo sapiens; identical to SEQ ID NO: 85

SEQ ID NO: 6391 - DNA, 307 bp, Homo sapiens
aaagtttatagaaathmtttattatwagacaaaaatagactctcththhhcccctattcatgtgatcctactctgaatctctgctcagaggaggcagtgactcgctccccacccctctcccatccctgccgtgctggcacctgcagctgggtggaactggcaggggctgatcccctggagggctgacgttctcctgcaggtggggctgcctgayctccttcggggctcaactgctgatgcctcctcacccctcacacacccacctctgacatctgctcacatgcaaggtcatcttgtgggsctgtcc

SEQ ID NO: 6392 - DNA, 380 bp, Homo sapiens
  misc_feature (1)..(380): n=a,t,g or c
tttttttttgatggtccattcgctttattgggtgcgtgtagtgttgtcatgacatctcctaaggaactggggggcacgtttgacactcatgaggtcagaacaggtctggtgggcggggggggggggggtcccagggtggtgaatacccacagcacacccccccaccaaaagagaaaacggggagaggagcctggcaggccagactctgatccccatggtccacacagggaaacccccaacagcggcctcggcccaccgcggcanagcagggngntggcaggcctggccacctcccattgcccgatcagcctgttttagggtntcatctggccccttttcacaactnacaactttggatgggggtgaattttaaaaaaagg

SEQ ID NO: 6393 - DNA, 3414 bp, Homo sapiens
ggcaggagggagggagccagaggaaaagaagaggaggagaaggaggaggacccggggagggaggcgcggcgcgggaggaggaggggcgcagccgcggagccagtggccccgcttggacgcgctgctctccagatacccccggagctccagccgcgcggatcgcgcgctcccgccgctctgcccctaaacttctgccgtagctccctttcaagccagcgaatttattccttaaaaccagaaactgaacctcggcacgggaaaggagtccgcggaggagcaaaaccacagcagagcaagaagagcttcagagagcagccttcccggagcaccaactccgtgtcgggagtgcagaaaccaacaagtgagagggcgccgcgttcccggggcgcagctgcgggcggcgggagcaggcgcaggaggaggaagcgagcgcccccgagccccgagcccgagtccccgagcctgagccgcaatcgctgcggtactctgctccggattcgtgtgcgcgggctcgccgagcgctgggcaggaggcttcgttttgccctggttgcaagcagcggctgggagcagccggtccctggggaatatgcggcgcgcgtggatcctgctcaccttgggcttggtggcctgcgtgtcggcggagtcgagagcagagctgacatctgataaagacatgtaccttgacaacagctccattgaagaagcttcaggagtgtatcctattgatgacgatgactacgcttctgcgtctggctcgggagctgatgaggatgtagagagtccagagctgacaacaactcgaccacttccaaagatactgttgactagtgctgctccaaaagtggaaaccacgacgctgaatatacagaacaagatacctgctcagacaaagtcacctgaagaaactgataaagagaaagttcacctctctgactcagaaaggaaaatggacccagccgaagaggatacaaatgtgtatactgagaaacactcagacagtctgtttaaacggacagaagtcctagcagctgtcattgctggtggagttattggctttctctttgcaatttttcttatcctgctgttggtgtatcgcatgagaaagaaggatgaaggaagctatgaccttggagaacgcaaaccatccagtgctgcttatcagaaggcacctactaaggagttttatgcgtaaaactccaacttagtgtctctatttatgagatcactgaacttttcaaaataaagcttttgcatagaataatgaagatctttgttttttgttttcattaaaggaccattctggcactttaatgataaaatcccattgtatttaaaacatttcatgtatttctttagaacaacataaaattaaaatttaacatctgcagtgttctgtgaatagcagtggcaaaatattatgttatgaaaaccctcgatgttcatggaattggtttaaacttttatgcgcaaatacaaaatgattgtctttttcctatgactcaaagatgaaagctgtttcatttgtgtcagcatgtctcagattgaccttaccaagttggtcttactttgttaatttatctgttgtccccttcctctcctctgccctcccttcttgtgcccttaaaaccaaaccctatgccttttgtagctgtcatggtgcaatttgtctttggaaaattcagataatggtaatttagtgtatatgtgattttcaaatatgtaaactttaacttccactttgtataaatttttaagtgtcagactatccattttacacttgctttatttttcattacctgtagctttgggcagatttgcaacagcaaattaatgtgtaaaattggattattactacaaaaccgtttagtcatatctatctaatcagatcttcttttgggaggatttgatgtaagttactgacaagcctcagcaaacccaaagatgttaacagtattttaagaagttgctgcagattcctttggccactgtatttgttaatttcttgcaatttgaaggtacgagtagaggtttaaagaaaaatcagtttttgttcttaaaaatgcatttaagttgtaaacgtctttttaagcctttgaagtgcctctgattctatgtaacttgttgcagactggtgttaatgagtatatgtaacagtttaaaaaaaaagttggtattttataagcacagacaattctaatggtaacttttgtagtcttatgaatagacataaattgtaatttgggaacataaaaactactgaataaatcatgtggcctaatattgaaaatgtcactgttataaattttgtacatttttgatcaaatgtacatctcccctttgctaacggccgtctgctctcaggttgacgtgggtttgatttctaagtgtttcacagtgtctgtaaatcaagaccaaagagcctgtcgatgagactgtttattaccagattcacttctgaattggccagaggaaatctgaatgtattatcctgtgtgtgtctaggtagagatattggaaggctgccaggggatttcgaagtttgcaacctttataggataactgatggcaatattaagacagacgcctgcttttgcaaataacttacaagactgtaaattccaaagatctgaatggggctttcctgatgttggtatctaaggcttaggcctatagattgatttacctttggaattgtgctccaaatgtctactgaagcttaaccgaagaactaataaatggactacagtagctcacgttacagggaaccaccctaggcagggaggctctgtgtgttaaaatgagggtctcactgctttaggattgaagtggctggaaagagtgatgcctggggaaggagatggagttatgagggtactgtggctggtactttctgtactaaacatttcctttttctattttaccactaattttcttttaaactgtgagccgtccaagtcagaagaagacagcaaaaaaagcaacttttccaacatacaatttacttttaataaagtatgaatatttcattttgagaacattccctggaattgccacataattcattaaaaacatttttttaagcaacacttggaacagtgtttactttaaatccttaatggccttaattaattctcagattcctgccccatcacttacagaaccaattcactttagagtgactaaaaggaaacgatagcctagctttctaaagccacgctgtgtccctcaattacagagggtaggaatgggtatacctctaactgtgcaaagcagagtgaaattcaattcatagaataacaactgctgggaatatccgtgccaggaaaagaaaaatttctggcaaatattttgtcactgctgtaaagcaaaatatttgtgaaagtgccaaaataaagtctgtcatgccaaaagt

SEQ ID NO: 6394 - DNA, 624 bp, Homo sapiens
cgtctgtcccaggggaccggaacacggagcaggaggagggcggtgaggcggtgcacgaggtggaggtggtcatcaagcacaaccggttcacaaaggagacctatgacttcgacatcgccgtgctccggctcaagacccccatcaccttccgcatgaacgtggcgcctgcctgcctccccgagcgtgactgggccgagtccacgctgatgacgcagaagacggggattgtgagcggcttcgggcgcacccacgagaagggccggcagtccaccaggctcaagatgctggaggtgccctacgtggaccgcaacagctgcaagctgtccagcagcttcatcatcacccagaacatgttctgtgccggctacgacaccaagcaggaggatgcctgccagggggacagcgggggcccgcacgtcacccgcttcaaggacacctacttcgtgacaggcatcgtcagctggggagagggctgtgcccgtaaggggaagtacgggatctacaccaaggtcaccgccttcctcaagtggatcgacaggtccatgaaaaccaggggcttgcccaaggccaagagccatgccccggaggtcataacgtcctctccattaaagtgagatcccactc

SEQ ID NO: 6395 - DNA, 1955 bp, Homo sapiens; identical to SEQ ID NO: 5409

SEQ ID NO: 6396 - DNA, 2350 bp, Homo sapiens
ctggcggagcagaggtgcagaagcaactgagtccaagttgtctggccggcttcaggtggacccagaagacgtccccaactcagggagattcagcgatcactcactcactcgctgtacagaatgatattcctcacggcactgcctctgttctggattatgatttcagcctcccgagggggtcactggggtgcctggatgccctcgtccatctcggccttcgaaggcacgtgcgtctccatcccctgccgctttgacttcccggatgagctgcggcccgctgtggtgcatggtgtctggtacttcaatagcccctaccccaagaactaccccccggtggtcttcaagtcgcgcacccaagtagtccacgagagcttccagggccgcagccgcctcctgggggacctgggcctgcgaaactgcaccctcctgctcagcaacgtcagccccgagctgggcgggaagtactacttccgtggggacctgggcggctacaaccagtacaccttctcagagcacagtgtcctggatatcgtcaacacccccaacatcgtggtgcccccagaggtggtggcaggcacggaggtggaggtcagctgcatggtgccggacaactgcccagagctgcgccctgagctgagctggctgggccacgaggggctgggggagcccgctgtgctgggccggctgcgggaggacgagggcacctgggtgcaggtgtcactgctgcacttcgtgcccacgagggaggccaacggccacaggctgggctgccaggcctccttccccaacaccaccctgcagttcgagggctacgccagcatggacgtcaagtaccccccggtgattgtggagatgaactcctcggtggaggccatcgagggctcccacgtgagcctgctctgtggggctgacagcaaccccccgccgctgctgacctggatgcgggacgggacagtcctccgggaggcggtggccgagagcctgctcctggagctggaggaggtgacccccgccgaagacggcgtctatgcctgcctggccgagaatgcctatggccaggacaaccgcaccgtggggctcagtgtcatgtatgcaccctggaagccaacagtgaacgggacaatggtggccgtagagggggagacggtctctatcttgtgctccacacagagcaacccggaccctattctcaccatcttcaaggagaagcagatcctgtccacggtcatctacgagagcgagctgcagctggagctgcccgccgtgtcacccgaggatgatggagagtactggtgtgtggctgagaaccagtatggccagagggccaccgccttcaacctgtctgtggagttcgcccctgtgctcctcctggagtcccactgcgcggcagcccgagacacggtgcagtgcctgtgcgtggtgaagtccaacccggagccgtccgtggcctttgagctgccatcgcgcaatgtgaccgtgaacgagagcgagcgggagttcgtgtactcggagcgcagcggcctcgtgctcaccagcatcctcacgctgcgggggcaggcccaggccccgccccgcgtcatctgcaccgcgaggaacctctatggcgccaagagcctggagctgcccttccagggagcccatcgactgatgtgggccaagatcgggcctgtgggcgccgtggtcgcctttgccatcctgattgccatcgtctgctacattacccagacacgcaggaaaaagaacgtgacagagagccccagcttctcggcaggggacaaccctcccgtcctgttcagcagcgacttccgcatctctggggcaccagagaagtacgagagcgagaggcgcctgggatctgagaggaggctgctgggccttcggggtgagcccccagagctggacctgagctattctcactcggacctggggaaacggcccaccaaggacagctacacgctgacggaggagctagctgagtatgctgaaatccgggtcaagtgaaggagctgggggcagcctgcgtggctgacccccctcaggaccctcgctggcccccactggctgtgggctcccttcctcccaaaagtatcgggggctgggccaggagggagtgaggcaggtgacagtgaggtcctgggggcctgacctccccctccttcccagctgcccctccctgccagcacccccacgccctcattacggctcctctctaacctcctttaccctcatctgtctggaggggagctctgtctgtccgtgttatttattgctacttcctgcctggtctcctgcccccacacctggccctggggcctgtacaaaagggacatgaaataaatgccccaaagcc

SEQ ID NO: 6397 - DNA, 952 bp, Homo sapiens
gcagctgcgctgcgactgctctggaaggagaggacggggcacaaaccctgaccatgaccccccacaggctgctgccaccgctgctgctgctgctagctctgctgctcgctgccagcccaggaggcgccttggcgcggtgcccaggctgcgggcaaggggtgcaggcgggttgtccagggggctgcgtggaggaggaggatggggggtcgccagccgagggctgcgcggaagctgagggctgtctcaggagggaggggcaggagtgcggggtctacacccctaactgcgccccaggactgcagtgccatccgcccaaggacgacgaggcgcctttgcgggcgctgctgctcggccgaggccgctgccttccggcccgcgcgcctgctgttgcagaggagaatcctaaggagagtaaaccccaagcaggcactgcccgcccacaggatgtgaaccgcagagaccaacagaggaatccaggcacctctaccacgccctcccagcccaattctgcgggtgtccaagacactgagatgggcccatgccgtagacatctggactcagtgctgcagcaactccagactgaggtctaccgaggggctcaaacactctacgtgcccaattgtgaccatcgaggcttctaccggaagcggcagtgccgctcctcccaggggcagcgccgaggtccctgctggtgtgtggatcggatgggcaagtccctgccagggtctccagatggcaatggaagctcctcctgccccactgggagtagcggctaaagctgggggatagaggggctgcagggccactggaaggaacatggagctgtcatcactcaacaaaaaaccgaggccctcaatccaccttcaggccccgccccatgggcccctcaccgctggttggaaagagtgttggtgttggctggggtgtcaataaagctgtgcttggggtcaaa

SEQ ID NO: 6398 - DNA, 3357 bp, Homo sapiens
ttggctggtgcacctaaataatacatatatcctcctcaaccccatcggtctctctgattcctaaatcatccccaaacatttctggtggcccatatggggattggagataacagatttactgtctcctttgcccatgggactagggccctggggctgtggaagacctggcatccaaggcatgccatgggggagtttcacccggacggagactggctctccccgcatcctgcccagcagtgcaactgaacctgagatggggctgcaggatgacaccagcacttcaggaaccgcgttgcaggtgtcacaccttggattcaccatagctggctgaaactagcagcagcagtgactcccgactatgaccagtggattaaccaacaagaccctgattgccccacccgaatagacctacggcgaatcccaaccaccagtaagaaggacaactgccctgctctgaccacactggaggctggtcagtctacacatggctgaagcttgaagatcttgcaagctcttgctcttagtcacatctggaagctgactagtctacacacagccgaagctaagaggaccactctagataagtaaatgtagataaaatttataagcctagttataattgttctgttgttacattattactgcaaatgctgcaaatgtccatgcccagaggaaggtttgccattcctgtgtgtagtgtaagcatgtttctattacatacactaatgttgttaccatttctgcctatactagaaggggagaaatctctagaaggatgcccacactgtgtacatactacctgggtaaggaataccatagttaaaactctactgtaccatacctacagtacaggaaccaagttaggaacctgcacatacaaccagaccacctattcggtctgtgacccaggaaataatcagctatatgtatgttatgaccctaagctcttaccctatgaattctggtttgaaatacatattaaatcagagggagaaaaagaaggagagttatagctcgaacaaaagaagcccctccctcctgtaaagggcctatttccttgtactttgatgcctgctatgctgcatatgttcacaatcctaaaaaaaaaccagaagccagtctgcaatggtgtaacacaagagaggcttagcaggagcagccctaagcatctgtacaaagaaccacaaatcggatgcccagactgtaacattcagtggtccacactaacacaactccaatatttatattcaggaaggagtgctctgctaagtagtatgttaaccaaaccaaactgtaagacaagaacatgcaatcctttacattttactatcttaaagccagagatacctttctggtctacaggacagacagcactataacgacttgatagactaggagcaggccttggagttccactactaattgtcaaaaagactaaaaggactcaaatgcatccaaccccgcaattctgggtccataatcattctataagcatttggataagccagtgcctgagcttcccccaccaaccaaaaacttatttgctcaactagctgaaaacatagctggcagcttaggaatttcctcatgctatgtacgtggaggaactaatatggggaaccagtggccatgggaggcaaaggaattaatgccacaagataacttcacttcgcttaaccctgccagtgaaccaacagcctcagccagtgtttggttgttaaaaacctccataattggaaagtaccgtatcgccgttgggaaaggctttcacagaggcagtaggagaaataacctgcctaggcaacagtattatgatgagactaaaaacaaaactctatggagaagcacccagaattactcctacttaccagatccaaatcctttatctccattctctaccctaagccacacttggcatcaactagaggttccaaatgcttcgaaagcaccctctggcctatattggatctgtggagcatgggcatattggcaactgccagctaaatggacaggagcatgtgtgtagtaacaatcaagccattcttctttctaattcctctaaagcaaggggaactcttatggtatccagttgatgatgaaaataaaagaagaactagaagagcataatcacaaaaatagacacaaatgtcaaaaaggatgtggacataggagactggaaagataatgaatggcctcctgaaagaataattaaatattattggccagctacctgggtgcaagatgggtcatggggttaccacaccccaatctatatgctcaactgcatcataaggttgcaggcagtctttgaaattataaccaatgaaacatcaagggcactagatttattggcaatacaagcaacacaaatgagaaatgctatatattgaaatagattggcattagattatcacttagcctctgaaggaagagtatgtggaaaatttaatttaaccaactgttgcctagaaattgctaataatggccgggttgtcatggaaatcagagctagaatgcacaagttggcccatgttccaattcagacttggtcctaatggtccctggattctttgtttggaggatggttctcaacctttggaggattcaaaaccctcactggtgggtttttgtttattcttggcatctgcctcatcctcccttaccttttacccctgtttattaggaggattcagtcaactatagaggcagtaataactcaacacactaccgcacagttgatggcattaaccaaatatcagccactgccagtagaagaagctcagctctgtgaagaggtggcaaatagtggtgctttctattaacacctttgttataaaaagcagcaaagggggaaatggaacaggaattaaaagaaattaaagaatgcataagcaaaaactcaattgtatgtagggaaacccaattcctcctgaggaagagaaagaggtggagtcctttaaaaattcactgcctgtttttccgtctgtagctagtgagccttatctctccctttcccaggcattgtgaagaccctgtttctccagctgtgcagctgcatggtcactagacagataaactcaagttgtaaaacatgtttttccttgaaaagtaagaaatgatgtaatacatgtctcaactgaataactgtctttgtttctcacttctgtagtaagcttccccctgcacagatctcccctctcaccccatgaaatgcttaaaaggtaacctgactctttgttcagggctcagtcctttggatgttaatctgactgggctggtgcacctaaataataaatacatcctcctcaaaaaaaaaaaaaaaaaaaaaaaaaaaaaaaaaaaaaaaaaaaaaaaaaa

SEQ ID NO: 6399 - DNA, 4466 bp, Homo sapiens
tctagatctctagtctataagaccagaggagacagtggctacacatataaatttcagtgtcttccactgatatccgagtgataagcaacttcctttctaaaattatgaaagtaactaagggtctaaaaaaaatttctagtgcggtagtcttaaaactacaaatagttttgtcatatctcctatgatgactccctcccttcagctgcctggagcccaggggtgggcagtgactttgtgtaggcagcaagcagccggtaacaaaataataattattattgttattattatattataataattgtaacaataacaattattattgaagctcatttacaactaaccatccaaaagacctctttcccctgtgtcttcaatccccaaggcagaggggtagggacagttctatccctcctctgcacttaacccttgaaacacatgcacccctttgtgactttaccctctgcagatggctctgaatgtcttaatgtctgagagaaagggatttagaaagcaaaatataaaaattttaaactagtccttcctaccttcctagaagtggcaagagttaaatgttgagatagactcaagggtaggatgactatttcagtttgcctggaagtgtttcagtttgcctggaagtatctcagttttagtgctcagttttagcaggagtcctgcatttcagagaacccctcaaccctgagcaaaataagatggttggtcaccctatggcttggtttgaccatcatcgctataacctgtatcttacctgcatgcatgacacaacacagtgctttacttccctaaaaatgacatcagccccactaaaatatatgtttagtttccaagccctacctagtcaccttctaccctaggagccaggttctcttttcccacccagacagaggagctgcactcagaaattcctagacatgagttaacactggattccttagccttctactcccatcatctcctgctcagccccagctaccacctaaactaggaagatcaagtctaccagtgacctccgtccatggcacttgctgcccctcctctgtccagctcttaccaatatagctgctggaacctggaggtcaaagtcaaattatcaaaaaaaggaactgagctggtgatgtgcactaacacagcaaatcacaggaaaggggaacccaggtaaattacagccttctgacctaggaagacgtgtggtttgcgtctctgagttacagaaacacaggaaatgcttactggaccagtcaatttcagaattttgggtcccaagctaggctgactcaccttcagaatggaaaccacgtgacagcccttatatcagggcacacatcacatgctcttccagaagtcaatgggtttggaaccctcacagatattgggaaagctcactaatcatttctgccagttatcagaggttgctctgaaactataaggaagattcaaagaaaatgccaagactgatattaaacttggcaggaacccttgttacagaattttcctgcctgacaaggttaaaagaacaataagcaggaaacacagtcctccaggaataatcaattctatttggcccctggtcaccttcactcagactaaattctaaaacatagaatttcaaataagctatttagataaccttgaccattctccacacacaagcccttgcctgaactattaatagtcaaggcaaagggtagttgttattgctgcctttttaaactgaatcatctgagaaattgcttcagacccccaaagaaagattactgttaacaattcaaaaactaaaatatttgatccctgagacagccttttcccccgacccgcccttcagggctcagtccgaccgactgcaaaggctgttgcaagattgcatcactgacctttgcaattttctggccagtttgattccccttctttcccctgccccctccctttctctgcttaaaggcctttggccaatttgcctctccttttccccaagtttgctaaccctttggccaatttgcctctctttttccccaagtttgctaactctagcatatccataaccaaagccaaactagaacgctccctcagccccaggtgattacagctaaccctggtcaaaatcaatcctacatcttcacacgtccaagagtactcacactctggattcttacctaagctgtctactacacgcccttctgcccacaaactgcttcaaagctgaagttgagctggagcagtgaagttgtacccccaaacccaggagggtggcagagaattattgaggagagcatgaaatacttccattctaaaatggcaagatgaacttctaccaacagccccttccatacttgaccccctacccccaagctcccaactccacttctcaagtggaagtgagaacaatttgaatttgaaggctcttccctgatacacggaagtacataaggaaacagctcgcaggcaaagagactaatctctctctctctctctctctctctctctctctctctctcacacacacacacacacacacacacacacacacctctgtgcataaaagcaccatcaatgaatagttttctatcaactgactctagttatacatgcatgtacctctaaataaaaccaaccaggcaggaaagaaacaatattagcacatattgctttatccaagcgtaacctgttctgtcctgttacccagatccttcccccttgccttctcctctctgatccattgccacacacgtgggaaggtgacaacccttccgaataaaaatgaaagctttcttctttagatggaacccccaaattccctcattatttataatgtcaggctgtcctggacaagggaagctgtgcacccgctgacaccagtaagaaggttgccgccatgtcagagatgtccgcggacacctccctgggctccgggtcctcccctgcgctcgcctggagtgggaccttcgcgtgcacactggccttcccacgcgccccgctgcgatggcacccgcgccgggccccctagctcacacagtcggagcgtgctcagcgcgtggccacctcttgccaggtcccagccgggttccaccccctccttttcccctcctcttcttcctccccctccgagttcccctggctctgaccgcgctggcctgggcccgagagcccaggaggcgtgtctcagagaaaagatataagcggcccccggacgctaaagcggtgccagcggcggagtctccaactgggagagctgcagctgccgagaggaggagaacgctgaggtcggtcggaccaacggacgcgctgaccgctgccaactgcagctcgcgctgcctcctgctcgcgccgtgccactaaggtagtccgcctttctatgagccctccccaagattagctgggtgcggggtggtgggagccgttctttggtggctgaagcccctctcctgctgctcctcctgcaggtcattcccgcctccgagagcccagagccgagatggaaacggtccaggagctgatccccctggccaaggagatgatggcccagaagcgcaaggggaagatggtgaagctgtacgtgctgggcagcgtgctggccctcttcggcgtggtgctcggcctgatggagactgtgtgcagccccttcacggccgccagacgtctgcgggaccaggaggcagccgtggcggagctgcaggccgccctggagcgacaggctctccagaagcaagccctgcaggagaaaggcaagcagcaggacacggtcctcggcggccgggccctgtccaaccggcagcacgcctcctaggaactgtgggagaccagcggagtgggagggagacgcagtagacagagacagaccgagagaggaagggagagacagagggggcgcgcgcacaggagcctgactccgctgggagagtgcaggagcacgtgctgttttttatttggacttaacttcagagaaaccgctgacatctagaactgacctaccacaagcagccaccaaaggagtttgggattgagttttgctgctgtgcagcactgcattgtcatgacatttccaacactgtgtgaattatctaaatgcgtctaccattttgcactagggaggaaggataaatgctttttatgttattattattaattattacaatgaccaccattttgcattttgaaataaaaaactttttataccatatctcatgtaattcctgagaggtgtggtgtcctggggtgggaagcagggagggtgagcaggtgggcgatggtgatgggttcttacctgagcactgcagagggagcagcttcctgagggtcagacacttgcttcacacctaggaactgtgtaataagttactacatgcatataagtctgttgaggacttgtttttccttcttgttaggggtgggaagagagaaaattttataacttccgtgagatttagcattttaacatcaaaaggtagatc

SEQ ID NO: 6400 - DNA, 586 bp, Homo sapiens
  misc_feature (1)..(586): n=a,t,g or c
ccacttgtttatattttaacagccactgagagatcagtgatgctgtggtgacagcagtcagcattatttcttagagaatacaaatgtattaagttagagtaatttcaggtgtgttaaacaggagatgcttctgaaggccataagtttggagcttactttaacctgacctacatgaacataagatttgtaggatgtggataaactttaagaactggatagtgaaggcgtaacttttgttttgtaaccagttacgcctcttctgtaaactctataagagtgctcaaaggtgaatcaaacttgtatatcattccttgtcaaataggctgttcccactggataagaaaatttgctgtatgttttcctgaaaaattttatagtgttctacaaagccatcaccttctgcagaaaaaaaatgttacttatgctccacctccccagccctcactaaaaactttggtagccctatggcgggtacccnaattaaggtcagtgcagaaatctccaccattacagaagtctcttacnattttggctcncaaaatactcnaactagtagcncggttgcnggatcnagaagtaggtagag

SEQ ID NO: 6401 - DNA, 381 bp, Homo sapiens
ctatggcaggtttatgtttttatttatgtattttaactgacttatttgtgtatcccactagaacaatacattcacaatatacttgcagaactgtgcctggcgcatcatgggagcagagaacttgtccagtgaatagttgttgaagaaaggagtaaaatctcccccaaaccctaaaggcatccttttcgtagtgtgtgtcccataggtatggctgctgagcaccagggctgctcaccatgctcccaagaagcagagtcagggaggcagacagcagggtttattaaggtgcacacccatgtctgagccccagctctctccgccttctgtggggagaagccctccggtctttccgagaaccttcaaactctggacagtttatgt

SEQ ID NO: 6402 - DNA, 220 bp, Homo sapiens
acggtgggatacgttttattgagaagtgtcatgacgaaggatatctagatcagggaagtctatcaggacagggtgaaagaaggcagtctgcctggcgagctgctcagcccccttccccatcagcctagcccctctttgaaccgtgccagttctagacggcctacaggagcgcgaatgagtgaggaacttggcacagagcacctttctgtagtaatcccca

SEQ ID NO: 6403 - DNA, 293 bp, Homo sapiens
  misc_feature (1)..(293): n=a,t,g or c
ttttttttactgtgaaattctaaaatcatatttattcaccaattcacagaaagtgtcataacgaccaccaacatgaatcagtttgtaggcatttacaagccacagctgaaaataaaaatctgtctgtgttgaataggcatttaacaaattacttgaaaactgcaagaatcataattattataaatttaangtttgtgattcaaacatgggtaagatcacagtcatggggagaagcccaacagattcctgtgatgatccttattttcttcctatatctttatatacataggagg

SEQ ID NO: 6404 - DNA, 439 bp, Homo sapiens
  misc_feature (1)..(439): n=a,t,g or c
tttttccccnattagtnannatatatatttnccccntaaatgagatgaaatgagtggcgtccnggggtggagggaggcgctggctggagtcggggctgggggtgggagggggtgagggaaaggttggggggggacgcatcactcaacgttgctgctgtcgaaggtntggcactgaaagtccccgtcaacgtactccatgcctggcagcttcatcccgtacttntccacgcaccagcagatgccacgtttgngccacgggaaggtttgcactgctttctcttgtagaatcctttgcggtcacaattgggcaggtacacagcacggggcaccatgcgtgggctggctttgagctcctgcagggaagcctccatgtgtctgcggcaggggccctgctcagattcctgtctcatttgcaggtgcagagangatccggggnttg

SEQ ID NO: 6405 - DNA, 277 bp, Homo sapiens; identical to SEQ ID NO: 2008
  misc_feature (1)..(277): n=a,t,g or c

SEQ ID NO: 6406 - DNA, 448 bp, Homo sapiens
  misc_feature (1)..(448): n=a,t,g or c
catatccatnnatcatattttattagctgtcaataccaccnttccattcatggcctgtgttttaattaaatttcataaactaccagtacaaatcaatacaatgcattttttaacacaccaacagcttgaatgttcttgaagcttttaaacaatgagtttactgtgagcaaacagaagcaaggactcaaagagatanttagctcatgcatctggngctggctaatanttttcacatgantgangaaaccactctatgttaactgtatttntntnnnaaanatagtttganatgggtaataaaatgcaattttcagaagcatcttgggtgntcgaggtaggacctgccttantttangagatanttcaggttacttccccctgggccggggggtgggatancatgtngccaaaancttcccntcccccctaggattctgggccggtgggg

SEQ ID NO: 6407 - DNA, 169 bp, Homo sapiens; identical to SEQ ID NO: 1795
  misc_feature (1)..(169): n=a,t,g or c

SEQ ID NO: 6408 - DNA, 2512 bp, Homo sapiens; identical to SEQ ID NO: 2425

SEQ ID NO: 6409 - DNA, 3128 bp, Homo sapiens; identical to SEQ ID NO: 2063

SEQ ID NO: 6410 - DNA, 1654 bp, Homo sapiens; identical to SEQ ID NO: 254

SEQ ID NO: 6411 - DNA, 1198 bp, Homo sapiens; identical to SEQ ID NO: 2041

SEQ ID NO: 6412 - DNA, 1418 bp, Homo sapiens
gtcagtccctggcccggagccaggctctctgtgctacttacatctccctcccttggctgaggtcccccgccacagcctggacccttccctcagaagcctggccgatgggtgcttttggggagcctctcagcctctggcaggggaggaggactgacacggaggcacacaggcctctcactgccgaggccagccttccttcctgctctgctctctcagtgccatggagaggcaggaagaggggcctgagggcggaaggggtttggggctcccatttcgccggccagtccctcctcctcagcctggcagtggcgctgggctccttcccctgggctgtactgagccgagcccaggggtttgcagagggtgggggtccatctctccagcttggctgcagacctcctttaccctgactcacaagccccactgatgctctgggccatgcccggctgacggctgctgtggatgccgcgagggacggacacacgtccggggcacccacgaggagggcccccagcctgggagactggccctgcggcctccacgtcaaactctcttcccaaagccctaacagaccagtggccgaggtgtggctcttattgcatccatccctgaagatgtgtggctgttgctgtcacctggagtccttttggggccaagatgtgtgtgcacccggggtcgtggccattcactcccaggcaggggtgagggtggcctggcccaggaggccaggaaggagggccctgtctgcctccacctctgggtgcaccccctgcctaccaccctcccttctagagagcacatcgcctgaccggggagaagtggggccgtggttcgagggagggctggccaggggtgggacccttatgagactcagtctgtgagtaaaactgggggctcaaatgcccaggatgaggggatcagtgactgtctaggaggatcccttgccttgtaggtgccccaagaccgcagggtagaaatcagccgggatgcctgcatcccacccccggccccagggcccaccacataaaatctgggagcccagagctgctgaggtgtggtcagctcccctaaaatgggcacggcccagcctgtcccatgaggaataaaggcccctggcccccttgagagagggcttgttggtgagggctgactcctgggggcccccaaggctcccctcctgtggggaggccaccttttaaggcaccactagcagtcaggatatggtggcatcagccctggggcctcctgggtggcaggggggcagcagctctcctccccactcacaggccctgcagtgctcatttggaattcctcccaagacccctggccacccagaccccccattcttcctaacactggcaataaaccctcaactgtgacccacaaaaaaaaaaaaaaaaaaaaaaaaaaaaaaaaaa

SEQ ID NO: 6413 - DNA, 642 bp, Homo sapiens
  misc_feature (1)..(642): n=a,t,g or c
ctattacaagtttagaantnacaaagcaattgtcaaaaaaagttagaactattacaacccctgtttcctggtacttatcaaatacttagtatcatgggggttgggaaatgaaaagtaggagaaaagtgagattttactaagacctgttttactttacctcactaacaatggggggagaaaggagtacaaataggatctttgaccagcactgtttatggctgctgtggtttcagagaatgtttatacattatttctaccgagaattaaaacttcagattgttcaacatgagagaaaggctcagcaaccgtgaaataaccgcaaatggcttcctctttccttttttnggaccatctcagtctttatttgtgtaattcattttgaggaaaaaacaactccatgtatttattcaagtgcattaaagtctacaatggaaaaaaagcagtgaagcattagatgctggtaaaagctagaggagacacaatgagcttagtacctccaacttcctttccttcctaccatgtaaccctgctttgggaatatggatgtaaagaagtaacttgtgtctcatgaaaatcngtaccatcncacaaggaggatgaacgccggaacaaaatggggtgtgtagacagggtccncaggtt

SEQ ID NO: 6414 - DNA, 438 bp, Homo sapiens
ttgaaacatcattttttatttcttctgagtatctacattcaattgctttagtaaattaacaaaaaacatgcaaatacatgtggtttctggtgacaagttctctaagacagtgtgggaaatgacctaaatatgcacgggcaaggctcagtctccagaggagtcgggcaggggtaggtaggggctgtctgatccccagggcaatgaagttcttagagctgaagcccagctcctcctttttaagaggaaatgacgagccaaagccttctgcgtttgttagagatcctagcttgtggccctgtcagaaccagaatccaggtatcccaattccctgtccactgcccccagcctgaagcccttcatccttcctcttagcaccctctcagggggaacaggggccctaggtatgtttacaaaagtccagaatgggtcagtatttgg

SEQ ID NO: 6415 - DNA, 457 bp, Homo sapiens
gctgcgcggacgtctttatttttcctgggtggggagcaggatacacagccacactgcagtcacttagcttgtaaaaatatctcaataaataaaacaaacaagcaacatatacactgaacagagaatattttttttaaaatggctagccaagcaatcacggagaaaggaaaagaatagcggcgtgaaagtaagaattccaggctgacttgaaacaatcatgcagaggctcgggggaggggaaggaactcgggggtcctcttctgagagccttggtccagtttcaacagaattgtacaagaatgcatttctgttttattaaaaaaatagacattaaaaaaggcacttagagggaaatacaaattcaaaatccaaatcctcataaatgtgttcctggaatctagacattttcagaaagaataaacctccccccaaacataagacccagaagaaaaatcca

SEQ ID NO: 6416 - DNA, 424 bp, Homo sapiens; identical to SEQ ID NO: 2011
  misc_feature (1)..(424): n=a,t,g or c

SEQ ID NO: 6417 - DNA, 445 bp, Homo sapiens; identical to SEQ ID NO: 290

SEQ ID NO: 6418 - DNA, 446 bp, Homo sapiens; identical to SEQ ID NO: 3463

SEQ ID NO: 6419 - DNA, 189 bp, Homo sapiens; identical to SEQ ID NO: 3306

SEQ ID NO: 6420 - DNA, 431 bp, Homo sapiens; identical to SEQ ID NO: 1918

SEQ ID NO: 6421 - DNA, 2532 bp, Homo sapiens; identical to SEQ ID NO: 296

SEQ ID NO: 6422 - DNA, 5084 bp, Homo sapiens; identical to SEQ ID NO: 2450

SEQ ID NO: 6423 - DNA, 2033 bp, Homo sapiens
ggagaatccccggaaaggctgagtctccagctcaaggtcaaaacgtccaaggccgaaagccctccagtttcccctggacgccttgctcctgcttctgctacgaccttctggggaaaacgaatttctcattttcttcttaaattgccattttcgctttaggagatgaatgttttcctttggctgttttggcaatgactctgaattaaagcgatgctaacgcctcttttccccctaattgttaaaagctatggactgcaggaagatggcccgcttctcttacagtgtgatttggatcatggccatttctaaagtctttgaactgggattagttgccgggctgggccatcaggaatttgctcgtccatctcggggatacctggccttcagagatgacagcatttggccccaggaggagcctgcaattcggcctcggtcttcccagcgtgtgccgcccatggggatacagcacagtaaggagctaaacagaacctgctgcctgaatgggggaacctgcatgctggggtccttttgtgcctgccctccctccttctacggacggaactgtgagcacgatgtgcgcaaagagaactgtgggtctgtgccccatgacacctggctgcccaagaagtgttccctgtgtaaatgctggcacggtcagctccgctgctttcctcaggcatttctacccggctgtgatggccttgtgatggatgagcacctcgtggcttccaggactccagaactaccaccgtctgcacgtactaccacttttatgctagttggcatctgcctttctatacaaagctactattaatcgacattgacctatttccagaaatacaattttagatatcatgcaaatttcatgaccagtaaaggctgctgctacaatgtcctaactgaaagatgatcatttgtagttgccttaaaataatgaatacaatttccaaaatggtctctaacatttccttacagaactacttcttacttctttgccctgccctctcccaaaaaactacttcttttttcaaaagaaagtcagccatatctccattgtgcctaagtccagtgtttctttttttttttttttttgagacggagtctcactctgtcacccaggctggactgcaatgacgcgatcttggttcactgcaacctccgcatccggggttcaagccattctcctgcctaagcctcccaagtaactgggattacaggcatgtgtcaccatgcccagctaatttttttgtattttagtagagatgggggtttcaccatattggccagtctggtctcgaactctgaccttgtgatccatcgatcagcctctcgagtgctgagattacacacgtgagcaactgtgcaaggcctggtgtttcttgatacatgtaattctaccaaggtcttcttaatatgttcttttaaatgattgaattatatgttcagattattggagactaattctaatgtggaccttagaatacagttttgagtagagttgatcaaaatcaattaaaatagtctctttaaaaggaaagaaaacatctttaaggggaggaaccagagtgctgaaggaatggaagtccatctgcgtgtgtgcagggagactgggtaggaaagaggaagcaaatagaagagagaggttgaaaaacaaaatgggttacttgattggtgattaggtggtggtagagaagcaagtaaaaaggctaaatggaagggcaagtttccatcatctatagaaagctatataagacaagaactcccctttttttcccaaaggcattataaaaagaatgaagcctccttagaaaaaaaattatacctcaatgtccccaacaagattgcttaataaattgtgtttcctccaagctattcaattcttttaactgttgtagaagacaaaatgttcacaatatatttagttgtaaaccaagtgatcaaactacatattgtaaagcccatttttaaaatacattgtatatatgtgtatgcacagtaaaaatggaaactatattgacctaaaaaaaaaaaaa

SEQ ID NO: 6424 - DNA, 3881 bp, Homo sapiens; identical to SEQ ID NO: 298

SEQ ID NO: 6425 - DNA, 362 bp, Homo sapiens
  misc_feature (1)..(362): n=a,t,g or c
gtggtcatctgtcactttattttgcccgtcttgtagcatgtgggtctttcgcagcaggaagtgtgttttacaaccagagcccccgccctcctgcagcgcaggcgcanctggctgggctcctgcttcccactctccacctcatccatatttgtcctcngtccctgccagtctcgaaaaggcactctgtcacgtgtacacaggaaagggccctnacaagaggatgggactgcaagttgtggctgccaggtctcactctcccttggatgggtcggcgggggttgggggtggaaggccagggggctgtaagttgcaaggttccccggcaaggttggctggggcttcaaggggggggaggcaagggc

SEQ ID NO: 6426 - DNA, 498 bp, Homo sapiens
  misc_feature (1)..(498): n=a,t,g or c
ttcagttcaatacagcacacctttattgagcacctaaggatctangctgccanaggagggcagagtcgacaaaacagtgggcaggcctcccctgcagctctctgtgtctgtgatgatggagctgggttggggaaatcctgctgtgacatttgccctgacgcagttccgcacagcatggtggcttccaagctatgctcttgatgggcacccgtaagagcttctacatgcattagagatggagcctctcctatctttgcaagcctttgtggttcttccctttaaatctgccatccacggacctcaacaggagaataatttggtcttcagtttgctctgttttagacaaatacttcacatggactggatgtaaactgttgcatagtttcgcaaaggctttctcattcattcctgaaattctccatcagtcacaaacacaaattgttcagtatctggggaattcaaagccctttcctcaaaacagacatttctcctcgtgcc

SEQ ID NO: 6427 - DNA, 244 bp, Homo sapiens
caggggaggcggcgacaaagaacgcagcctctaacattatatattaaaatagccacagttcttgtgcacacaattccatcctctcacccctgcctcccccgccaggcccaggaacagccttaaaagaaagatggtggttttccttttcgagaggcgaggaaacatccgctcagtctttatggaccttgagaaatggtgaggcttcccctccccccgtctctgcctcccggccgggcgtgcaaat

SEQ ID NO: 6428 - DNA, 433 bp, Homo sapiens; identical to SEQ ID NO: 5135
  misc_feature (1)..(433): n=a,t,g or c

SEQ ID NO: 6429 - DNA, 370 bp, Homo sapiens
  misc_feature (1)..(370): n=a,t,g or c
ttcagtaggtaacaaaatgatctattgtttcaattccttctgatcaagtgactttattccataaaacagtacatcagctgggcaggttcggtctcctcctggatgtatgaccagtcattatttatttgttcctgtaaacatactagggatacagtgacactggtcataactaaatttgaagtaaattagtactgtgacctccaagggcaggtgtgaagcatgttatcagcgcctgaaacaccttgtagtggtttcactaacataagttaaaacataagcacttaggaagaaaagtcttccctcattaaatttctggcatangtgcagctacatgttcatcctgggaacttaaaagtaccttcctccttag

SEQ ID NO: 6430 - DNA, 475 bp, Homo sapiens
atcggcagcactgaagctttccattctttattttcatcaggttcaaaatcaatttccaaacagtctcctacatttttcccactgccatggggtcctgggcgtccgggcccccaatattcacgcactcgcaccacgcactcatattccctcaccccaccatcacggccccaaagaaggtcttccctctcgcgaagtccaccatatcggggtgactgatgttgacgtacaccctctcgcccctccggagctgcaccaggccgccgaaccccacgctcgtgtaccagagaggcccgtacccttgtctcctggccgggtccagcactggagtcaccgtctcggcgccctcgagcagcagctcgggagtgcccggcccgtagcgccccccgtggtgacaaagacagtttggctgggggaatcctgggggccagcacccccctccattggccacacctgctgctgccagggcagtggagta

SEQ ID NO: 6431 - DNA, 318 bp, Homo sapiens
  misc_feature (1)..(318): n=a,t,g or c
tagattgtaagcaaaagaaatcaaggtcaagatctggaagcaagaagaaaatgctaacattacctcatggtgctgacgaggtttacattctccgatgcaggttttgtggcctagtctttcgaggacccttgtctgttcaggaagactggattaagcacttacaacgacatattgtaaacgctaatcttccacggactggagctggcatggtggaagtcacgtcactacttaaaaagcctgcctccattacagaaacttcattttctctacttaatggccgaagcagctttcataggaaccagggnaccttttaaatag

SEQ ID NO: 6432 - DNA, 229 bp, Homo sapiens
tttagcttgcaattcttattacatctttattatcagtcaaggtcacagtcatattaaaaatatataatttaattctcaaataatgtctttgttcctctttttcctaaagtcctttgtcaaaagaagtcaaagttgaatatattttgtagctgatatacatatgctgacagacagcacaatgttctgaaatgaaaacagagatattattgctttataaaaagaaacttgg

SEQ ID NO: 6433 - DNA, 415 bp, Homo sapiens
aagtaaaatgtttgctcaactttattgaatgtcattagatttataggaatcattaaagaattagataccagagtccccccggcccagacccccacaaaaaaagtcagtgaaaaagatgtgagtgaaagaagtttgtcaaggcaaatgtgtgaaaggatacatgtgtacatcaccctttaaatgctttccctgagtattctatgaagtctggggatcttcgaatgctattaatcttagacagtaaattttataaagaaattctttaaaagtaggacttaattctcctccgtagtgagtttttaagcagaggatatctactacatggattcctttgcctcttgacaggctcaagttccatctgcctcccaggcagctttttgagtctttcatagaagcctgcttttaatatatgcca

SEQ ID NO: 6434 - DNA, 448 bp, Homo sapiens; identical to SEQ ID NO: 391

SEQ ID NO: 6435 - DNA, 409 bp, Homo sapiens; identical to SEQ ID NO: 3782

SEQ ID NO: 6436 - DNA, 221 bp, Homo sapiens; identical to SEQ ID NO: 5943

SEQ ID NO: 6437 - DNA, 2691 bp, Homo sapiens
ggagacagacagacagctggcaagaggcagcctgggggccacagctgcttcagcagacctcatggctgagtgagcctcccctgggcccagcaccccacctcagcatggtccaagcccatggggggcgctccagagcacagccgttgaccttgtctttgggggcagccatgacccagcctccgcctgaaaaaacgccagccaagaagcatgtgcgactgcaggagaggcggggctccaatgtggctctgatgctggacgttcggtccctgggggccgtagaacccatctgctctgtgaacacaccccgggaggtcaccctacactttctgcgcactgctggacacccccttacccgctgggcccttcagcgccagccacccagccccaagcaactggaagaagaattcttgaagatcccttcaaactttgtcagccccgaagacctggacatccctggccacgcctccaaggaccgatacaagaccatcttgccaaatccccagagccgtgtctgtctaggccgggcacagagccaggaggacggagattacatcaatgccaactacatccgaggctatgacgggaaggagaaggtctacattgccacccagggccccatgcccaacactgtgtcggacttctgggagatggtgtggcaagaggaagtgtccctcattgtcatgctcactcagctccgagagggcaaggagaaatgtgtccactactggcccacagaagaggaaacctatggacccttccagatccgcatccaggacatgaaagagtgcccagaatacactgtgcggcagctcaccatccagtaccaggaagagcgccggtcagtaaagcacatcctcttttcggcctggccagaccatcagacaccagaatcagctgggcccctgctgcgcctagtggcagaggtggaggagagcccggagacagccgcccaccccgggcctatcgtagtccactgcagtgcagggattggccggacgggctgcttcatcgccacgcgaattggctgtcaacagctgaaagcccgaggagaagtggacattctgggtattgtgtgccaactgcggctagacagaggggggatgatccagacggacgagcagtaccagttcctgcaccacactttggccctgtatgcaggccagctgcctgaggaacccagcccctgacccctgccaccctccggtggcccaggtgcctacctccctcaagcctgggaagtcacaggaagcagcagcagtaaggacaaggggccggattccaggtcttcaacactggccactcctctgcttcctctgttggccccagatggacagtaaggggaacctccaatgtctctctgaacttaaagacaggagctggcatttatgacagacaaagaaagaagcccaggtgtcctggtgttctctgagacactctttgtgagcttcagtttcctgttctataacatgaacataagtgcttagctgccatgagggaaaagtaatgagagaagtttctagaagccactccagccactccttcctggggctgacaaaagggtgattccaagatcatccttcacccgaggtcctgcccaagcacaggccagatgcaagaatggggaaaagtctggtcctgatctccaagtctcaacatcctatcagtgactctgctccctgaccacacatcggaagggctggatgaccccaatcaaaagaaagaacaaggactctggttacccttgccctccacccatgtgtcataagagtaggctacagaggtgaccaggcctggcagttgaaatctctggaagagggaacatgtggggactactcagaggcaaagaggagctgctcctgcctccatggttgctggccactcccaccaactactcttagggaggctaagcagtctctgttttgcttccatggctcaaataataccctgggtatgcaggacccactataccttgcatttgctggtacacctagagagcttggctgtttccaaaaacaatcagggtcataaccatccatgcagacatggaggctcggctgaaccaggactcctcactgtctacctgagagaatgagcacccctcatccatctcagcatcaacacaatttccaggggacctcaggtctacctcaggactgaacgccacacctcaggattcctcctccttgaatctgagactggctgcccattctgagatggggatgaaggtaagatgccgcatcaccaggcacgccgcccctgacagctgccttgataccagctctctgtggaaacccccgaggagttggatctggagaacagctgggcctcctcactcaggacttctctcctgaagaacacgcagtgctaaaactgaggatgatttccctaatgcttctgcttggccttatggaggagctgctccttccttacagccttggggatggacttgcccacacctccacctcccctgagccctgtgagaggcacgactgtctatgccaatgaggctcggtggggggctctcaagtgcctgatcctgccctgggctcagagccagcccagagggaagcaactgcacagccccacaggccctccctggcactgtccccccaaccccatctcagagctcagagggtacaagctccagaacagtaaccaagtgggaaaataaagacttcttggatgactgac

SEQ ID NO: 6438 - DNA, 458 bp, Homo sapiens; identical to SEQ ID NO: 4821

SEQ ID NO: 6439 - DNA, 493 bp, Homo sapiens
  misc_feature (1)..(493): n=a,t,g or c
acggtatttttgtttgtaagttaaaaagaaaaaaaaaaagaaaaagttccgggcattttgcatcagaaaacaactttgtcttggggcacacttggaagttgcatgttttctttccttcccttatccccattcggtcctctttttcctctctcgctttagttttcaaccttgttggtgctgagagagagaaccgagaggtcccagtacaagggcagggcagggcagggaagctgccaagctccgcaccccagaggagtgttctggactacagccttgtcttatggtcaaattgatacccttaataagaaaggaaaggaaagggaaaacagatcctcccctctgcttttttatttgttaaccagaatcaccctggagggtcccttctggaacccttggggcctgcggttaattgttgggagccacagcggttcctagggggtgaggagggtttagccatccctgnaccctgggnagttgcattggtaaggnaggc

SEQ ID NO: 6440 - DNA, 393 bp, Homo sapiens
  misc_feature (1)..(393): n=a,t,g or c
tttaccagaaaataaagccattttattatgatttttttctctgccatgtggtgggaatngnaggtgagtggatgggtgtgaatggctgaccctgctggaggccctgcgggntcatacttggcctggactgtctcctccagcctgtccaagcgcttctggagctcctgcaccgtggcctggagcttccgcatctcctantccanncgagacacggcatccgagctgggagtgccactggctctggtgctgccctcctgcgcccggtgtccaggccccggttgaccctcagctcccggctctttgggggtacgtagccatccttgagggagatgaggaggggcccagcatcccgaccccccagccactcctcagccgttaggcaagggtcgggcc

SEQ ID NO: 6441 - DNA, 1427 bp, Homo sapiens
gtctgggcgccagcccccgccctgggcccgccgcccgcgctctctggcgcagcgctagctccgccgcgctcagctgccctgcgccggcacccctggtcatgagcgccccctcgacgctgccccccgggggcgaggaagggctggggacggcctggccctctgcagccaatgccagtagcgctccggcggaggcggaggaggcggtggcggggcccggggacgcgcgggcggcgggcatggtcgctatccagtgcatctacgcgctggtgtgcctggtggggctggtgggcaacgccctggtcatcttcgtgatccttcgctacgccaagatgaagacggctaccaacatctacctgctcaacctggccgtagccgacgagctcttcatgctgagcgtgcccttcgtggcctcgtcggccgccctgcgccactggcccttcggctccgtgctgtgccgcgcggtgctcagcgtcgacggcctcaacatgttcaccagcgtcttctgtctcaccgtgctcagcgtggaccgctacgtggccgtggtgcaccctctgcgcgcggcgacctaccggcggcccagcgtggccaagctcatcaacctgggcgtgtggctggcatccctgttggtcactctccccatcgccatcttcgcagacaccagaccggctcgcggcggccaggccgtggcctgcaacctgcagtggccacacccggcctggtcggcagtcttcgtggtctacactttcctgctgggcttcctgctgcccgtgctggccattggcctgtgctacctgctcatcgtgggcaagatgcgcgccgtggccctgcgcgctggctggcagcagcgcaggcgctcggagaagaaaatcaccaggctggtgctgatggtcgtggtcgtctttgtgctctgctggatgcctttctacgtggtgcagctgctgaacctcgtcgtgaccagccttgatgccaccgtcaaccacgtgtcccttatcctcagctatgccaacagctgcgccaaccctattctctatggcttcctctccgacaacttccgccgatccttccagcgggttctctgcctgcgctgctgcctcctggaaggtgctggaggtgctgaggaggagcccctggactactatgccactgctctcaagagcaaaggtggggcagggtgcatgtgccccccactcccctgccagcaggaagccctgcaaccagaacccggccgcaagcgcatccccctcaccaggaccaccaccttctgaggagcccttcccctacccaccctgcgtggccacctcccaaggggtgggcaccattcctacagccccgaagactgcatctcctgaatgctcacctaagctccaccacctgttccttccagcagcccatgtacctgccggagagtgtcagaactcttctgctgc

SEQ ID NO: 6442 - DNA, 1092 bp, Homo sapiens; identical to SEQ ID NO: 4157

SEQ ID NO: 6443 - DNA, 2088 bp, Homo sapiens; identical to SEQ ID NO: 704
  misc_feature (1)..(2088): n=a,t,g or c

SEQ ID NO: 6444 - DNA, 1522 bp, Homo sapiens; identical to SEQ ID NO: 1079

SEQ ID NO: 6445 - DNA, 2354 bp, Homo sapiens
gggaggaccccaatctaggcccaagagggaaaggccacgtgcctgtatgagcgtatgagcatgtgcatgcgcgtgtgtgcacagggtggtgcacctggcaggggtccttgagtgaggcatgccccattctgtagcagggaacctggaatgggctgtgtgttctgcaagaaattggagccggtggccacggccaaggaggatgctggcctggaaggggacttcagaagctacggggcagcagaccactatgggcctgaccccactaaggcccggcctgcatcctcatttgcccacatccccaactacagcaacttctcctctcaggccatcaaccctggcttccttgatagtggcaccatcaggggtgtgtcagggattggggtgaccctgttcattgccctgtatgactatgaggctcgaactgaggatgacctcaccttcaccaagggcgagaagttccacatcctgaacaatactgaaggtgactggtgggaggctcggtctctcagctccggaaaaactggctgcattcccagcaactacgtggcccctgttgactcaatccaagctgaagagtggtactttggaaagattgggagaaaggatgcagagaggcagctgctttcaccaggcaacccccagggggcctttctcattcgggaaagcgagaccaccaaaggtgcctactccctgtccatccgggactgggatcagaccagaggcgatcatgtgaagcattacaagatccgcaaactggacatgggcggctactacatcaccacacgggttcagttcaactcggtgcaggagctggtgcagcactacatggaggtgaatgacgggctgtgcaacctgctcatcgcgccctgcaccatcatgaagccgcagacgctgggcctggccaaggacgcctgggagatcagccgcagctccatcacgctggagcgccggctgggcaccggctgcttcggggatgtgtggctgggcacgtggaacggcagcactaaggtggcggtgaagacgctgaagccgggcaccatgtccccgaaggccttcctggaggaggcgcaggtcatgaagctgctgcggcacgacaagctggtgcagctgtacgccgtggtgtcggaggagcccatctacatcgtgaccgagttcatgtgtcacggcagcttgctggattttctcaagaacccagagggccaggatttgaggctgccccaattggtggacatggcagcccaggtagctgagggcatggcctacatggaacgcatgaactacattcaccgcgacctgagggcagccaacatcctggttggggagcggctggcgtgcaagatcgcagactttggcttggcgcgtctcatcaaggacgatgagtacaacccctgccaaggttccaagttccccatcaagtggacagccccagaagctgccctctttggcagattcaccatcaagtcagacgtgtggtcctttgggatcctgctcactgagctcatcaccaagggccgaatcccctacccaggcatgaataaacgggaagtgttggaacaggtggagcagggctaccacatgccgtgccctccaggctgcccagcatccctgtacgaggccatggaacagacctggcgtctggacccggaggagaggcctaccttcgagtacctgcagtccttcctggaggactacttcacctccgctgaaccacagtaccagcccggggatcagacatagcctgtccgggcatcaaccctctctggcggtggccaccagtccttgccaatccccagagctgttcttccaaagcccccaggctggcttagaaccccatagagtcctagcatcaccgaggacgtggctgctctgacaccacctagggcaacctacttgttttacagatggggcaaaaggaggcccagagctgatctctcatccgctctggccccaagcactatttcttccttttccacttaggcccctacatgcctgtagccctttctcactccatccccacccaaaagtgctcagaccttgtctagttatttataaactgtatgtacctccctcacttctctcctatcactgctttcctactctccttttatctcactctagtccaggtgccaagaatttcccttctaccctctattctcttgtgtctgtaagttacaaagtcaggaaaagtcttggctggacccctttcctgctgggtggatgcagtggtccaggactggggtctgggcccaggtttgagggagaagtttgcagagcacttcccacctctctgaatagtgtgtatgtgttgatttattgattctgtaaataagtaaaatgacaatatgaatcctcca

SEQ ID NO: 6446 - DNA, 4034 bp, Homo sapiens
gcagccagagctcagcagggccctggagagatggccacggtcccagcaccggggaggactggagagcgcgcgctgccaccgccccatgtctcagccagggcttccttcctcggctccaccctgtggatgtaatggcggcccctgctctgtcctggcgtctgcccctcctcatcctcctcctgcccctggctacctcttgggcatctgcagcggtgaatggcacttcccagttcacatgcttctacaactcgagagccaacatctcctgtgtctggagccaagatggggctctgcaggacacttcctgccaagtccatgcctggccggacagacggcggtggaaccaaacctgtgagctgctccccgtgagtcaagcatcctgggcctgcaacctgatcctcggagccccagattctcagaaactgaccacagttgacatcgtcaccctgagggtgctgtgccgtgagggggtgcgatggagggtgatggccatccaggacttcaagccctttgagaaccttcgcctgatggcccccatctccctccaagttgtccacgtggagacccacagatgcaacataagctgggaaatctcccaagcctcccactactttgaaagacacctggagttcgaggcccggacgctgtccccaggccacacctgggaggaggcccccctgctgactctcaagcagaagcaggaatggatctgcctggagacgctcaccccagacacccagtatgagtttcaggtgcgggtcaagcctctgcaaggcgagttcacgacctggagcccctggagccagcccctggccttcaggacaaagcctgcagcccttgggaaggacaccattccgtggctcggccacctcctcgtgggcctcagcggggcttttggcttcatcatcttagtgtacttgctgatcaactgcaggaacaccgggccatggctgaagaaggtcctgaagtgtaacaccccagacccctcgaagttcttttcccagctgagctcagagcatggaggagacgtccagaagtggctctcttcgcccttcccctcatcgtccttcagccctggcggcctggcacctgagatctcgccactagaagtgctggagagggacaaggtgacgcagctgctcctgcagcaggacaaggtgcctgagcccgcatccttaagcagcaaccactcgctgaccagctgcttcaccaaccagggttacttcttcttccacctcccggatgccttggagatagaggcctgccaggtgtactttacttacgacccctactcagaggaagaccctgatgagggtgtggccggggcacccacagggtcttccccccaacccctgcagcctctgtcaggggaggacgacgcctactgcaccttcccctccagggatgacctgctgctcttctcccccagtctcctcggtggccccagccccccaagcactgcccctgggggcagtggggccggtgaagagaggatgcccccttctttgcaagaaagagtccccagagactgggacccccagcccctggggcctcccaccccaggagtcccagacctggtggattttcagccaccccctgagctggtgctgcgagaggctggggaggaggtccctgacgctggccccagggagggagtcagtttcccctggtccaggcctcctgggcagggggagttcagggcccttaatgctcgcctgcccctgaacactgatgcctacttgtccctccaagaactccagggtcaggacccaactcacttggtgtagacagatggccagggtgggaggcaggcagctgcctgctctgcgccgagcctcagaaggaccctgttgagggtcctcagtccactgctgaggacactcagtgtccagttgcagctggacttctccacccggatggcccccacccagtcctgcacacttggtccatccatttccaaacctccactgctgctcccgggtcctgctgcccgagccaggaactgtgtgtgttgcaggggggcagtaactccccaactccctcgttaatcacaggatcccacgaatttaggctcagaagcatcgctcctctccagccctgcagctattcaccaatatcagtcctcgcggctctccagggctccctgccctgacctcttccctgggttttctgccccagcctcctccttccctcccctccccgtccacagggcagcctgagcgtgctttccaaaacccaaatatggccacgctccccctcggttcaaaaccttgcacaggtcccactgccctcagccccacttctcagcctggtacttgtacctccggtgtcgtgtggggacatccccttctgcaatcctccctaccgtcctcccgagccactcagagctccctcacaccccctctgttgcacatgctattccctggggctgctgtgcgctccccctcatctaggtgacaaacttccctgactcttcaagtgccggttttgcttctcctggagggaagcactgcctcccttaatctgccagaaacttctagcgtcagtgctggagggagaagctgtcagggacccagggcgcctggagaaagaggccctgttactattcctttgggatctctgaggcctcagagtgcttggctgctgtatctttaatgctggggcccaagtaagggcacagatccccccacaaagtggatgcctgctgcatcttcccacagtggcttcacagacccacaagagaagctgatggggagtaaaccctggagtccgaggcccaggcagcagccccgcctagtggtgggccctgatgctgccaggcctgggacctcccactgccccctccactggaggggtctcctctgcagctcagggactggcacactggcctccagaagggcagctccacagggcagggcctcattatttttcactgccccagacacagtgcccaacaccccgtcgtataccctggatgaacgaattaattacctggcaccacctcgtctgggctccctgcgcctgacattcacacagagaggcagagtcccgtgcccattaggtctggcatgccccctcctgcaaggggctcaaccccctaccccgacccctccacgtatctttcctaggcagatcacgttgcaatggctcaaacaacattccaccccagcaggacagtgaccccagtcccagctaactctgacctgggagccctcaggcacctgcacttacaggccttgctcacagctgattgggcacctgaccacacgcccccacaggctctgaccagcagcctatgagggggtttggcaccaagctctgtccaatcaggtaggctgggcctgaactagccaatcagatcaactctgtcttgggcgtttgaactcagggagggaggcccttgggagcaggtgcttgtggacaaggctccacaagcgttgagccttggaaaggtagacaagcgttgagccactaagcagaggaccttgggttcccaatacaaaaatacctactgctgagagggctgctgaccatttggtcaggattcctgttgcctttatatccaaaataaactcccctttcttgaggttgtctgagtcttgggtctatgccttgaaaaaagctgaattattggacagtctcacctcctgccatagggtcctgaatgtttcagaccacaaggggctccacacctttgctgtgtgttctggggcaacctactaatcctctctgcaagtcggtctccttatccccccaaatggaaattgtatttgccttctccactttgggaggctcccacttcttgggagggttacattttttaagtcttaatcatttgtgacatatgtatctatacatccgtatcttttaatgatccgtgtgtaccatctttgtgattatttccttaatattttttctttaagtcagttcattttcgttgaaatacatttataaagaaaaatctttgttactctgtaaatgaaaaaacccattttcgctataaataaaaggtaactgtacaaaataagtacaat

SEQ ID NO: 6447 - DNA, 328 bp, Homo sapiens
agtagacctcaaaggtcccatgggattctaatctgtctgctccaagaactacagattccaaaccaaaagaggcaagcaagtctgcgctgaccccagtgagtcctgggtccaggagtacgtgtatgacctggaactgaactgagctgctcagagacaggaagtcttcagggaaggtcacctgagcctggatgcttctccatgagccgcatctcctccatactcaggactcctctccgcagttcctgtctcttctcttaatgtaatctcttttatgtgctgtattattgtattaggtgttatttccattatttatattagtttagccaaa

SEQ ID NO: 6448 - DNA, 6746 bp, Homo sapiens
ctgcagtgtttggtctcaccaagtttcccacaataaagagacatgagtcacctttcaagaccctttacccccaagaatgtggtcttcacacatgagaccaaggtctacaagtggtcaggagagagggggtctgctcagatgggggagtagtgcctgagctggcctcaagagggttaagtggccctgcactgaaaacctggacactgagttagggtagggctgggggaaaacttgggctttggagtcgtagggtctgggttcaaatccacagaccattcccttcctagctgtgtgttggtgggtaattcactggatctttctgagtcctggtttcctcatctgaggtaaaacgagtttgccggttggtctgagagctgttctaggcatggtggggagaccctgacaggcagaggcagccctgctctcaagcagttgatttacagctggggaaacaagacagccacaaatgcaatacctcaaactcaacttctcaccagaaagctccttttcctaattttcacagccagtccctcagcctcctgggccccaaatactagtaaaacctttgcctcctctctcttctttctttcttgtaatcatataggtacaaagtcctaccaattcttcctgaaatatgtttccttatcaaaaagtcctgcaaagccgtgcgtggttgctcatgcctataatcccagcactttggaggctgggaggatcgcttgagtccaggagttcgagaccagcctggacaacatatggagacccatctctaccaaaaattttaaaatcagcaggggtggtagtggcaagcacctgtggtctcatctacttgggaggctgaggtggggggattgttggagcctgggcggttgaggctgcagtgatctgtgattgcaccactgcactctagcctgagggacagagcaagaacttgtatcagaaaaaaaaaaaaaaagtcctgcggtactggacactgccattgcctatacgattcccactccctcatcctccctagcaggatatcaattttgttcgaagtgtcaatgaaggccaggtgcggtggctgatgcctgtaatcctaacactttgggaggccgaggcaggcggatcacctgaggtcaggagttcaagaccagcctggccaacatggtgaaaccctgtctctactaaaaacacacaaattagcagggcatggtggcgtgcacctgtaatcccagctactcaggaggctgagacaggagaatcacttgaacccggagtggaggttgcaatcagccaagatcacaccactgcacttcagcttgggtgacaagagtgaaactctgtctcaaaaaagaaaaacaaaacaaaaacaaacaacaacaacaaaaagcaaagtgtcagtgaaggtccagcaaaagactcccttcctattgccctttgcagccagggtcatcatgtgacacagttcagatcaatgagatggaggctgagggtccctgggaaagatgtttttcctatacaggtaccacctctttcagcttcactctttccattttccacgtgaacaggccttgtagcctggaggagctacagctgcctttttgagatgctgaggcaccctgtctgaagaaggccctcacatcactcaacttgactactgggtgagcccttggagaggcttcccagcctctgctcttcaagccgaagtaccacaggggacacgagtcccagagttacaggaccccagctatggttcatgtgtaaagggaaccattaggcaaccaggggaaatgatgaagaagatctacatttacaaatgtggaaagatgttcgtggtatattgttaaattaaaaagctgtttaaaaatagtttttgggtcaagtgagatgactcacttatacttttagtataagtatgtcccatgcaatatctggaacgtacttgtactaaggggtttctccctccatcggcacatcccaggcatcctggcagctgctggcctccagcaaccccacattctagttgtgtgggagtgggttgtggcatggaccctgtgggctaccactgccctgacctgcttcttcacacactggtatttgtatctgtggtaaacccagtgacacgggggagatgacatacaaaaagggcaggacctgagaaagattaagctgcaggctccctgcccataaaacagggtgtgaaaggcatctcagcggctgccccaccatggctacctgggccctcctgctccttgcagccatgctcctgggcaacccaggtaaggccttcccctcgggatcgatcctgatggcccacccagcctcgcactctcaggctggctgaacctggagcttggactctgtgggcacccaggtgcccctgcctccccccggccttctcccccgtcatggaggcctggccctcccctcagagccaggcttagtccggtgtgctgcccagcctgtcactggcctggccaaggaggagagacaggccagggattctggtcctaactctactggccacactgtgtggcctgagacccccctttccctcccaagcccctgcctccgcatctgcgtggtgaaggccattggcctcatcggtggatctgcgtttcctcgggcctacactgtctaggattgtgcggggctggtgagagaacaagatctcttccgtgttcaaggcagacttcctgccccctgcaccctgctctctcccaggccttgaggtcagtgtgagccccaagggcaagaacacttctggaagggagagtggatttggctgggccatctggatggaaggtaaaaaaagaaaatcccttgaaaggagattgagggaagtttctagacaaaccgacccccaaatctgtgttgctgggggaacagaggagaagagagagtctcgccctcctggctttctagaaggaacgtgagaacacgtgtttgtgctgagagtgggtcagagcggctccagggcaaagcatgtggacaggtatcctggccccctgcaaggcccagctcctgtcctaggccctggtcacctcctggactcccaccagccaggagaacgggctttccctctccttccgcctgcggaggggaagctgaagtctggtcttcctcaggtctggtcttctctcgtctgagccctgagtactacgacctggcaagagcccacctgcgtgatgaggagaaatcctgcccgtgcctggcccaggagggcccccaggtacgtgttggctctctgctcacctgccacagtccctctcctttccctcctccctggtggctcctggggtgaggtctggagctctctaatggtcaggaggtgggagtggaggctgggctgtttctgacgatgctggttttgttgaattcatgtctggccaggagggctacaggtatctggcagactcctccaggaggatcctctggggtctcaccctccaaggagcctggggctgcagaacccaaataggcagactcccctgggagttcctcaataggagaggggcaagtgcagggctgggaaagtactggggttgtgggaggctgtttctggggtgtctcagagcctctaagacaagcaaaagggtgggtaggggccaggcagccagttcaggccttcagtgtatccacgctctgggaagagatcacggacattcctgccggcctcagaaacacaaagggcccctttcctgggcactttcacgcgctcccagagtgtctgagagaccatcataagggctttctttcctgacagggtgacctgttgaccaaaacacaggagctgggccgtgactacaggacctgtctgacgatagtccaaaaactgaagaagatggtggataagcccacccaggtgaggccaaggggctacagagcctcctgtctgctgctcaatggaggggccagcctgtgaccaggtcggggatcggggagcccgggggcaccttgcacagtgatcctgggggagggcttcctagaagggaatctgtgagtccccgtgtgtctgtggatgaatttcagagaacttgtgaaattgtgactctctggaactgtgtaagtcagacggcagagtatacatggttttcatcatgtatcctcaaagagggcttgtcccagagaagttaggaatcttcccctaaagccctaacatttgtgtccaaggcagagtttgagaagctagttccccaagaggcctgggtcaggactgataaatcccagatctgctacttccaagctgcatggccttgggcaagtcacttccactttctgagcccctgttatcttatctttgaaatgtgatggataatagtccctatcttgcaagttgtcaaacccttttttttttttttccttgagataggatcttactctgagacccaggctggagtgcactggtgtgatcttggctcactgcaacctctgcctccctggcccaagcaattctcctgtctaagcctcctgagtacctggggctccaggtgtgcgccaccatgcccagctaatttttgtacttttgtagaaacagggtctcactgtgttgcccaggctggtctccaacttctgagctgaagcaatccacctgccttggcctcccaaagtgtgggattataggcatgagccactgcacctggctgctgaagctttttaaaagagctgagggctgggatgtgcttagctccacgtccagcactgagtaaatgcttaacgaatgactgtgttactaccaagaattattgtttcactctccctccttccctctcctctgctgccccaaactactcagcatcctggcactgcaggctcgcacttagccctggatacccagattcatcctcctcccctgggatggcatagaagagactttaaaaccaaatgagccaagactccaagctctgaccacacctcccacccccaccagtcttctctatgcaccccctctatatctggagcccccagccaggttctggaccaaggtagctacatggcagagcatttaatgtgtgcctggcagccatgggcaccattctccacacagaaggcagggacaggtgcacaaggggctgagaccccagcagggctaactgtccttgtctcaggagccctacctggccagtcttgggccaggccttggggactgggagtaggggctgacccgtctgtacagtctctggccccatggcaccaggtgccagctcctcgcacccagtactcccattgctagggctgctggaacctgcagggttggcagagctgggcaggactcaccctataaccatgtccactgtggtgctgctgctgcagagaagtgtttccaatgctgcgacccgggtgtgtaggacggggaggtcacgatggcgcgacgtctgcagaaatttcatgaggaggtatcagtctagagttatccagggcctcgtggccggagaaactgcccagcagatctgtgaggacctcaggttgtgtataccttctacaggtgagtgcagaggtgacagcagggatacctcctgagggttggagacagcttcccccaggatatatcaaagctgcctccttactcccccatctcccagcatgggaaagtgtggagaattgagcagatggactttagctagaaatgtttgagaaatactgattagagcttgggcttcagacacaggtggttgtggagtaaaatctggtctccatctctccctggctgtgtgaccttaagcaaataacttgacctctctgagcttcagtttcttcatctgtgaaggagagatagcaatcctgatttttgagattggaatgagaattgaaggaggtcaccgtgtgtgtggacctgaccctggggaaatgtcctcagactgaggctattcaaggtcatcagaccctcagtcaaactccaacccagcccagcacatggcccctggggtcgggagctggggccatatcctcccccacaatcctgggccctgagatctgggctagggaacccttcaggcaggggagcatgaggcctttccctccatggctgcccaggctgtgctgagagaacagatctcggctgtaggaaacggggccagaaaggggcctcggtgattggctctggcagctcagctggcacttgccaatagctctgggattttatgctggcagatcgggggtccccaccatttcctgtcattggagcttgtggcttttctattcaaggccccacagcctgctcaggctgccgactggcttccaggatgtgcctctgggtgtgttcagtagggtcaggtggctctgggaccttaagcaagtaacattctgagtgcctgcttctccttgaggacccaccacatctgcccacagctagctgttctctccgctccaggtcccctctgagccctctcaccttgtcctgtggaagaagcacaggctcctgtcctcagatcccgggaacgtcagcaacctctgccggctcctcgcttcctcgatccagaatccactctccagtctccctcccctgactccctctgctgtcctcccctctcaggagaataaagtgtcaagcaagattttagccgcagctgcttcttctttggtggatttgaggggtgggtgtcagtggcatgctggggtgagctgtgtagtccttcaataaatgtctgtcgtgtgtcccatacactgttgtagatgttatggatttagtggtgaacgagacaaccttaacagcattcacacagttagtcgtgaaatgcttactgagcactcaccacagccatgca

SEQ ID NO: 6449 - DNA, 427 bp, Homo sapiens
  misc_feature (1)..(427): n=a,t,g or c
tgtgcatgttttaatttattaacacaaacatttaaagtacgctttttaaaaaaataatcatgtcttggcattttttcaggtactatattcatagcctcaaaaaatagaagtggttgggtctcttctgcccctgggntngggtgagctgcagccgcaccggggccatgtccctccctagaggcngctcctcccttccagccagcaatgttgcccaacgcgggaggccagctgtgcagaacccagcatgcaggcatctcactcccaattcagcctgggaaatcggaactgagagccccacgatgaagccctgagctgatgctgacatgacactaattcactggaaacgagggtgatgggggcacagagcctctcatgctgtgcgccctgaagcccaccctctgggaatggaaggggacttctcacgcga

SEQ ID NO: 6450 - DNA, 413 bp, Homo sapiens
  misc_feature (1)..(413): n=a,t,g or c
aacctccaagacattttattttgacagaaaaggtgtgacacatccatcagaaatgggatcagaaatttttggtctcccagtccccagtcctgatttttaattcccaatttcaaaattctatactaacatccaaactataacttgacttttaaatttaccccactcctcgggaagagaagtgcaatgcaggcaggcagctgtttccaggagatcagaaaagggtaaatgaatactcaagatttacagcgtcaaaaggctatgttgaggataattcttatgactatgtaaaagacaaggtagtgaaattgtgagggccctggcggcacaactccacagaatgactgaagcatgctgcagtggagaactggaaatgtatcncttgttgccctccatctccacccaccctcaagact

SEQ ID NO: 6451 - DNA, 432 bp, Homo sapiens
  misc_feature (1)..(432): n=a,t,g or c
ttttttttttcatgggaaaaaacatttatcatgccagttgccatgggtcaggagtgcaggcactgttaacctgactcttctggcttggggtctgtcacaagctacaaatcaaagtgtcaagtgggctgcagtctcacatgaaggcttcactggggaaggatctgcttccaagctcattcatatggttgtcagcaggattcagttcctcataggctattggactgagggtctcagttcttcactggctgttttctggaggcctccctcagttcctcacatgtgagcctcttccccatgggcaagctcacaacatggcagcccatctccatctgttcgggcctcggtcgcgccgccggggncttgcagacgcgaatgtaaacagaaacacagtgaaaggcgttcgganagcctcgtgantggggcaggggggcn

SEQ ID NO: 6452 - DNA, 508 bp, Homo sapiens
  misc_feature (1)..(508): n=a,t,g or c
ttttttttttttattatttagaaatgtaaacatttatttaaaagtaggtagcaagttaaaaatgaatacttgcctgaaatcataaaacataatcaagttctttttaaaacagttaatttttttcctataatttactttcatcgaaagtatattatctttgtttaacatgctagatagaagcaatttagcaacataaaatatattagctatagtatgttcaaaagaatgagaaatataaattcagagatgagaccatcattttttgcagttaaaaaaaaaaatgttgattctggtgcaacatacactgattatccaggttttacattttagggctgaaaccctgaggaacctgctggtgactgtttagcactngagcagagttcagtgtggcatgcgcttcccagagttaaaagcnaaagcagactggagaaacnaaaaacccacatccttggcatttcngaggttttcacctggtaatcntagggtttccccaatttattagaatgtt

SEQ ID NO: 6453 - DNA, 833 bp, Homo sapiens
aaaccagcctcatgtgacaaagcgcaggacccctcactgccccaactgcttgctgttctctctttcttgggctctaaggacccaggagtctgggtgcacagcctccttctctctgagattcaagagtctgatcagcagcctcttcctcctccaggacccagaagccctgagcttatccccatggagctctgccggtccctggccctgctggggggctccctgggcctgatgttctgcctgattgctttgagcaccgatttctggtttgaggctgtgggtcccacccactcagctcactcgggcctctggccaacagggcatggggacatcatatcaggctacatccacgtgacgcagaccttcagcattatggctgttctgtgggccctggtgtccgtgagcttcctggtcctgtcctgcttcccctcactgttccccccaggccacggcccgcttgtctcaaccaccgcagcctttgctgcagccatctccatggtggtggccatggcggtgtacaccagcgagcggtgggaccagcctccacacccccagatccagaccttcttctcctggtccttctacctgggctgggtctcagctatcctcttgctctgtacaggtgccctgagcctgggtgctcactgtggcggtccccgtcctggctatgaaaccttgtgagcagaaggcaagagcggcaagatgagttttgagcgttgtattccaaaggcctcatctggagcctcgggaaagtctggtcctacatctgcccgcccttccagcccttccccagcccctcctcttgtttcttcattcattcaacaaaatttggctgg

SEQ ID NO: 6454 - DNA, 284 bp, Homo sapiens
  misc_feature (1)..(284): n=a,t,g or c
gcaaacatctttattaatntcatataaaaataaggtccatggacggtcctcggggctggggcttgcgggggcgaggtgcactttataagttacaggccaggctcctgctgcggctaagtatggctatttggngggggctttagggtgggtgctgcaagagcatttgggggaaggggcgggcgatgctnccctctntggccaagaggaggatgcaccagcccgtttncggcgggccacagcgnaggagcggctccccggccagccgagctnaggccaccttcctt

SEQ ID NO: 6455 - DNA, 510 bp, Homo sapiens
  misc_feature (1)..(510): n=a,t,g or c
ttgtgtaaagtttattgggggtgttttctggaccaggacctgtcagggggtcagagaagcaagactgggtcanactggttacaggtgacttcccaggcatttctggagggctgaattgaagaaggaatgccaagactttgaagcctttcagactntccccaggagaagggtntagcattagacagagcagctctctttgaccaagagaggacatttcctgagaagaaacttggctgtgagatgtcaacaacccataattccagcagccatggnatgaagtttctcagttctggaatctgagtggagcactacagcatccactacagtggtgaaagaaggattcgaactcagggaaacctgacccctcatgacttcattataattctttccttgcaactcaatgactatcatcattttcactttacagttcaaatatagaacctcagagttaaggaacttgcctaacatgccngaaattttagggcccnaggtatacnaccgaaagcccca

SEQ ID NO: 6456 - DNA, 464 bp, Homo sapiens
  misc_feature (1)..(464): n=a,t,g or c
ttctgttgcatctgggaaaatttgttccctaggtctgtcaactccagccgcatcgtgtctccctgcagatcttcacaagcatctagcgcagggtccatgaggaaggggacgtcccctttctgggagtacagaagtgggtcactggagcattagaagaacatcaacatcatctttctaacccaatccttttgaagtgatttacaacacacaaaacaaatagactatttgtaaatgaacatccattaggaggtcatgctcatttttgtctttnttttactgatagagctaggaaagccacaaaacgcagggagggccagtgtaccctatcaatataaccaccccatggggacccaacccctcccaaggacggnaccaatacagcttgggaatccgtggggcctaccctgtatttacccattaccttgtggacccaggtganggggcattttagggnccccgggggg

SEQ ID NO: 6457 - DNA, 1465 bp, Homo sapiens
ggcctggccccggccctagctcgtcggctgtgtattggggcgcgtggaggctgcagtcacggtggcgcccgcggggacggaggagggaatgagtgaagaggagcaaggctccggcactaccacgggctgcgggctgcctagtatagagcaaatgctggccgccaacccaggcaagaccccgatcagccttctgcaggagtatgggaccagaatagggaagacgcctgtgtacgaccttctcaaagccgagggccaagcccaccagcctaatttcaccttccgggtcaccgttggcgacaccagctgcactggtcagggccccagcaagaaggcagccaagcacaaggcagctgaggtggccctcaaacacctcaaaggggggagcatgctggagccggccctggaggacagcagttctttttctcccctagactcttcactgcctgaggacattccggtttttactgctgcagcagctgctaccccagttccatctgtagtcctaaccaggagcccccccatggaactgcagccccctgtctcccctcagcagtctgagtgcaaccccgttggtgctctgcaggagctggtggtgcagaaaggctggcggttgccggagtacacagtgacccaggagtctgggccagcccaccgcaaagaattcaccatgacctgtcgagtggagcgtttcattgagattgggagtggcacttccaaaaaattggcaaagcggaatgcggcggccaaaatgctgcttcgagtgcacacggtgcctctggatgcccgggatggcaatgaggtggagcctgatgatgaccacttctccattggtgtgggcttccgcctggatggtcttcgaaaccggggcccaggttgcacctgggattctctacgaaattcagtaggagagaagatcctgtccctccgcagttgctccctgggctccctgggtgccctgggccctgcctgctgccgtgtcctcagtgagctctctgaggagcaggcctttcacgtcagctacctggatattgaggagctgagcctgagtggactctgccagtgcctggtggaactgtccacccagccggccactgtgtgtcatggctctgcaaccaccagggaggcagcccgtggtgaggctgcccgccgtgccctgcagtacctcaagatcatggcaggcagcaagtgaagccccagctggactcatggatgtgcaccctttgctccctgctctttctgcctctgggctcatgtatctgcgcagctctggtaccctctgtgggtgccatctctacctctgacacagactgcctgccttgaagctgagaaggcacagggcaaggagccaaggaccacagagcctcagccagcccaggatccgtcctcattttattggtgatgatgaatgggaatgaaatcagggggctgtctactagagcctggaataaatatgctgctttgtgga

SEQ ID NO: 6458 - DNA, 6672 bp, Homo sapiens
cctcccaactggtgactggttagtgatgaggctgtgtgcttctgagctgggcatccgaaggcatccttggggaagctgagggcacgaggaggggctgccagactccgggagctgctgcctggctgggattcctacacaatgcgttgcctggctccacgccctgctgggtcctacctgtcagagccccaaggcagctcacagtgtgccaccatggagttggggcccctagaaggtggctacctggagcttcttaacagcgatgctgaccccctgtgcctctaccacttctatgaccagatggacctggctggagaagaagagattgagctctactcagaacccgacacagacaccatcaactgcgaccagttcagcaggctgttgtgtgacatggaaggtgatgaagagaccagggaggcttatgccaatatcgcggaactggaccagtatgtcttccaggactcccagctggagggcctgagcaaggacattttcaagcacataggaccagatgaagtgatcggtgagagtatggagatgccagcagaagttgggcagaaaagtcagaaaagacccttcccagaggagcttccggcagacctgaagcactggaagccagctgagccccccactgtggtgactggcagtctcctagtgggaccagtgagcgactgctccaccctgccctgcctgccactgcctgcgctgttcaaccaggagccagcctccggccagatgcgcctggagaaaaccgaccagattcccatgcctttctccagttcctcgttgagctgcctgaatctccctgagggacccatccagtttgtccccaccatctccactctgccccatgggctctggcaaatctctgaggctggaacaggggtctccagtatattcatctaccatggtgaggtgccccaggccagccaagtaccccctcccagtggattcactgtccacggcctcccaacatctccagaccggccaggctccaccagccccttcgctccatcagccactgacctgcccagcatgcctgaacctgccctgacctcccgagcaaacatgacagagcacaagacgtcccccacccaatgcccggcagctggagaggtctccaacaagcttccaaaatggcctgagccggtggagcagttctaccgctcactgcaggacacgtatggtgccgagcccgcaggcccggatggcatcctagtggaggtggatctggtgcaggccaggctggagaggagcagcagcaagagcctggagcgggaactggccaccccggactgggcagaacggcagctggcccaaggaggcctggctgaggtgctgttggctgccaaggagcaccggcggccgcgtgagacacgagtgattgctgtgctgggcaaagctggtcagggcaagagctattgggctggggcagtgagccgggcctgggcttgtggccggcttccccagtacgactttgtcttctctgtcccctgccattgcttgaaccgtccgggggatgcctatggcctgcaggatctgctcttctccctgggcccacagccactcgtggcggccgatgaggttttcagccacatcttgaagagacctgaccgcgttctgctcatcctagacgccttcgaggagctggaagcgcaagatggcttcctgcacagcacgtgcggaccggcaccggcggagccctgctccctccgggggctgctggccggccttttccagaagaagctgctccgaggttgcaccctcctcctcacagcccggccccggggccgcctggtccagagcctgagcaaggccgacgccctatttgagctgtccggcttctccatggagcaggcccaggcatacgtgatgcgctactttgagagctcagggatgacagagcaccaagacagagccctgacgctcctccgggaccggccacttcttctcagtcacagccacagccctactttgtgccgggcagtgtgccagctctcagaggccctgctggagcttggggaggacgccaagctgccctccacgctcacgggactctatgtcggcctgctgggccgtgcagccctcgacagcccccccggggccctggcagagctggccaagctggcctgggagctgggccgcagacatcaaagtaccctacaggaggaccagttcccatccgcagacgtgaggacctgggcgatggccaaaggcttagtccaacacccaccgcgggccgcagagtccgagctggccttccccagcttcctcctgcaatgcttcctgggggccctgtggctggctctgagtggcgaaatcaaggacaaggagctcccgcagtacctagcattgaccccaaggaagaagaggccctatgacaactggctggagggcgtgccacgctttctggctgggctgatcttccagcctcccgcccgctgcctgggagccctactcgggccatcggcggctgcctcggtggacaggaagcagaaggtgcttgcgaggtacctgaagcggctgcagccggggacactgcgggcgcggcagctgcttgagctgctgcactgcgcccacgaggccgaggaggctggaatttggcagcacgtggtacaggagctccccggccgcctctcttttctgggcacccgcctcacgcctcctgatgcacatgtactgggcaaggccttggaggcggcgggccaagacttctccctggacctccgcagcactggcatttgcccctctggattggggagcctcgtgggactcagctgtgtcacccgtttcagggctgccttgagcgacacggtggcgctgtgggagtccctgcggcagcatggggagaccaagctacttcaggcagcagaggagaagttcaccatcgagcctttcaaagccaagtccctgaaggatgtggaagacctgggaaagcttgtgcagactcagaggacgagaagttcctcggaagacacagctggggagctccctgctgttcgggacctaaagaaactggagtttgcgctgggccctgtctcaggcccccaggctttccccaaactggtgcggatcctcacggccttttcctccctgcagcatctggacctggatgcgctgagtgagaacaagatcggggacgagggtgtctcgcagctctcagccaccttcccccagctgaagtccttggaaaccctcaatctgtcccagaacaacatcactgacctgggtgcctacaaactcgccgaggccctgccttcgctcgctgcatccctgctcaggctaagcttgtacaataactgcatctgcgacgtgggagccgagagcttggctcgtgtgcttccggacatggtgtccctccgggtgatggacgtccagtacaacaagttcacggctgccggggcccagcagctcgctgccagccttcggaggtgtcctcatgtggagacgctggcgatgtggacgcccaccatcccattcagtgtccaggaacacctgcaacaacaggattcacggatcagcctgagatgatcccagctgtgctctggacaggcatgttctctgaggacactaaccacgctggaccttgaactgggtacttgtggacacagctcttctccaggctgtatcccatgagcctcagcatcctggcacccggcccctgctggttcagggttggcccctgcccggctgcggaatgaaccacatcttgctctgctgacagacacaggcccggctccaggctcctttagcgcccagttgggtggatgcctggtggcagctgcggtccacccaggagccccgaggccttctctgaaggacattgcggacagccacggccaggccagagggagtgacagaggcagccccattctgcctgcccaggcccctgccaccctggggagaaagtacttctttttttttatttttagacagggtctcactgttgcccaggctggcgtgcagtggtgcgatctgggttcactgcaacctccgcctcttgggttcaagcgattcttctgcttcagcctcccgagtagctgggactacaggcacccaccatcatgtctggctaatttttcatttttggtagagacagggttttgccgtgttggccgggctggtctcgaactcttgacctcgggtgatccacccacctcagcctcccaaagtgctgggattacaagcgtgagccactgcaccgggccacagagaaagtacttctccaccctgctctccgaccagacaccttgacagggcacaccgggcactcagaagacactgatgggcaacccccagcctgctaattccccagattgcaacaggctgggcttcagtggcagctgcttttgtctatgggactcaatgcactgacattgttggccaaagccaaagctaggcctggccagatgcaccagcccttagcagggaaacagctaatgggacactaatggggcggtgagaggggaacagactggaagcacagcttcatttcctgtgtcttttttcactacattataaatgtctctttaatgtcacaggcaggtcccagggtttgagttcataccctgttaccattttggggtacccactgctctggttatctaatatgtaacaagccaccccaaatcatagtggcttaaaacaacactcacatttattctgctcacatatctgtcatttgagcagggctcagcggggacagctccttctgtcctactctgtgtcaggtggggcagcttgagggttgggctggtgtcacctgaagactcattcttctgtacgtctgacaggcaatgctggctgttggctgggggcctcagtgcactacggaatagttggctaggacccctccatgtgggctagttgggcttcctcataagtatggtggctgggttggagggtgtcccaaaaagaaaggaggggatagagagagaccacttttcataacctagccttagaagtcacacagtattacttctgctacatatatatgttttaagaggcagggtctcactctgtgcccccagtctggaatccagtggtatgatcacggctcactgcagcctcaacctcctgggctaagtgatcctcccacctcagcctcccgaatagctgggactacaggtgtgagtcaccaaagcccagttaatctttagttttcatttttgtagagccagggtctcactatgttgcccaggcaggtcttgaactcctggcctcaagtgattctcctgcctcagcctcccaaagtgctgggattacaggtgtgaaccaccacacccagcccacttctgccatattctgttggccagtgtgacaaggattgctactgtcctacccaccctcctttccaccacatgtgcacatgcacgtgtgtgcacgtacacacacatacacacacacgcgtgcacacaccagagcccaccttggctcaagtcctcttttctgagaggacttttctttgtggcttcctaaaattcagtggaaaattaattgtttggggatgagaaaggttgaagcaccaaaagcttaccaaggggaatgtttgcctctgcctctgacacacagctctgtcctgggagtgagctggtttttagcggagacggagtcccaccttggctgcagggagtcgaaaggacttggaagctccgctttctacccagcgagcccctggtggcagtgggagctgcctgttcagctccagctcaccagccccagtgcccacaggatcagtctgattcccaagctctgctcctctccccagcaagtgagagctgggtgtcaagagggtctgaggaatccagacccggctgcgtggttgatgatctttgcagacaggcaagcacctcctgcctcgaactggctgcaaagggtatcaggtgctgccatccaggttcagcttgtaaatagctcaggtgtaccctgcacttgcagactctacagaggccatgggctcctgtgtgtgcggctacaggagtgagcactgaggtgtgctctgatcatccactgtgccatgtgccaggtttttggtctgacccactgcttttggtctgtgtgatgatgaaatgaggtcagagcctcgagttattaacactaacgatttgttaatgatagctactgtttattattttatttaatttttttgagacagagttttcactcttatgcccacgctggagtgcagtgagccgagatcacgccactgcactatagcctaggtgacagagtgagactctgtctcaaaaaaacacaaaagtttctctttttcaaaacattttactttaaaaggagccaatttaaagaaaactgttaatagttcaggtaacaggcagatacaggaaaagctgctgacagtgttgtatgaggtttgaggattttgatccaagctggtccactcagtccatagcagagaatgaaagggcccagagagggtggtgacctctgcctgaagtcacacagtgagtcgaggacagggaggtgaccccaggtttctatgtgtagggcgggaggatgttctgggacacagttcaattctcatttgtcacacactttggctattagagatcaaccccttcgctcctgtgtcttgcaatggcagccttggcaaacgctaaatgaaaatcgtgacaacacttgtgttatgaagcatttactttgtgttcaccttgt

SEQ ID NO: 6459 - DNA, 174424 bp, Homo sapiens
gatccacccactttggcctcctgaagtgctgggattacgagcgtgagccaccatgcctggccctgtaacatcatattgacaataataatgtaggcactttggtaattgttttgtcttcctgagtggtatttctcaatgtgaactacaaagatacctatggccatatctaggatcgaagtcttttttttttttttttttgagacggagtctcgctctgtcacccaagctggagtgcagtggtgtggtctcggctcactgcaagctccgcctcccgggttcacgccattctcctgcctcagcctcccgagtagctgggactacaggcgcctgccaccacgcctggctaattttttgtatttttagtagagacggggtttcaccatgttggccaggatggtctcgatctcctgacctcatgatccgtcagccttggcctcccaacgtgctgggattacaggcgtgagccactgcgcccggcagatcaaagtcttactatgaacttccagggtgtaatgtacacagccctatctgttttttgtttgtttgtttgttttgagatggagctttgctcttgttgcccaggctggagtgcaatggtgtgatctcggctcacagcaacctccgcctcccgggttcaagtgattctcctgcctcagcctcccgagtagctgggattataggcttgcaccaccacgcccggctaatttttgtatttttagtagagacggggtttctccacgttggtcaggctggtttcgaactctcgacctcaggtgatatgcccacctcggcctcccaaagtgctgggattacaggcatgaaccaccgagcccaaactgccctatctgttttaagttgaggaaaactcatcctatcggcactttctcaggcatcagtcccaatcaagttatgttattataacagcctattaagtctccctggataacagacaaccctttgtttatctatccatactgggactggagagaacttacattgtacaattaatgaagtgacactatacctgtcttcgcagcctctgtctatatatgccagctttctatttgtctattgattagatgctgttcttttcatctgttctatagtcatactcccaatatctaattgtttccttaaatatgaatagacctgctaatgatgatattgtagaactgttttgtagctaatcgctgctgggctatgagtgagggcctcctacagcttgatgagattatgtcttcccagcattaaattattccaaacagatcaatttcaaagttaacaaataacatgtttgttagtaaaaatgtgagtcttacagtaattcaaataactactactgtggatagagcagccaatatcagttacaggaaaagtcctttgtggcaaccacaatgcaatcctcccaagagtccagctgcgtttttctttctctccgatggccctgtaggtgatcagtagcatttgaaaacattcctctcagcacagtggcagcccaggcctttcccctggaaaagctttgatgcagaggaaacctcccagtcaactgggatggtggacttctttggagggttacctccagatccttctgactttttaagtctcatggtttctaaagaagagaaaagccctattaagtattgagtatgattacgggaggattcagttaaatcaggcacaggaaggacaggcacagtggctcatgcctgtaatcccagcactttgggaggctgaggcaggtggatcacctgaggccaggagttcaagaccagcctagccaacatggcaaaatcccatctctacaaaaaatacaaaaaaataaaactagccaggtgtggtggcacatgcctgtaatcgcagctacttgggaggctgaggcagaagaatcacttgaatctgggaggcagaagttgcagtgagttaagatcatgccaccgcactccagcctgggcaacagagcaagattctttctcaaaaaataaaaataaataaaaacattaaaaaaaatcagccacaggacttggtcttggacccaagttagagctaggccatgcttgcttaaaggagtggctgtaattttaaacaaggctagtgggaaagttccaggccatcttaacattgtaggttgcagaatcttagccaatgagtctttcagagctggattcattaatctgttaattaattcattaatttttttatgctactggatgacagtaggaataaaatgactttttctgtctgattcaaatgctctggtattccaaaagggagattcatatttattaagagagtctttcccgttgtttatacttcctgcctaaggatcagcttctttttctctttcttcacagctgacaacagatgccctaattgtttcacctcaggttagcactattgcaatttgtctagcaagaccttatgtccccgccagatgagaaattgcagtaaagccaaagcatcagttttgcattgctcttcagtttctgaggctactagtagcaagtcgtctacatagcaaataatcatagatccctctggtgggagaaattcctctaagtgtttctgtaaatgactagagaaaataatgggagcattcaaaacccttgaggaattctttgccataaatatcagactttctcataagcaaaagcaaacaagaatttagattcatctgctagaggaatggaaagacagaaaatgcagaaaattgatcaattacagagaaaaactttgcagacaatggtaccaaagtcagaagagttgctggagtaaacagaacagcacacatatttacttctttaagtttttttttttttttttttgagacggagtctctctctgccgcccaggctgaggtcagtggtgtgatctcggctcactgcaacctctgccccccgggttcaagtgattctcctgcctcagcatctcaagtagctgggattacaggcacgtgccaccacacccagctaattttttgtatgtttcttagagacagggtttcaccatgttggccaggctggtctcgaacttctgacctcaggtgatctgcctgccttggcctcccaaagtgctgggattgcaggtgtgagacaccatgcccggccttctttaagatcttatacaaataaatttagcagttgaccatcttcatcacttttacctctcttctctttcagaagtgtgagactatttcaaagtggtggctttttcaaattatcccttgtttctctattttttttttttttttttgagacaagatcttgctctgtcgcccaggctggagtgcagtggcaccatctcaactcacagcagcctcaacctcccgggctcaagagatcctcccacctctgcctcctgagtagctagggctagaggcatgcaccacctcgcctcgctaatttttctttctttctttctttctttctttctttctttctttctttctttctttttttttttttttttttttgctttttgtagagacagggtcttgctatgttgcccaggctggtctcaaactcctgggctcaagagatcctcctgcctcgacctcccaaagtgctgggattacaggtgagcccccacatctggcctctaattcttttataacctatttcattccttctaattgagctcccaacaaaggagattgttttacacacagctatggcttatccctttggtaaattgattttatgggttctatagctcaaattaaatcagcatctcgattctctagggctcaaaagatgccttgatttgtgtcagctcaggaagggggcttttccggcactgaatatggtaggcttggaggtgcatggcaggtctctcgccaataggtttacagaagagtcaggaggaaaggggagcacttgctccttaggcaaaggcagagggcccatctgatgggaattggagggaagggaatatgtagaaggctgagtcaagatacaaacaacctgtactgatggaaagcaagagcaagagctttccaaggcaaatgcagaataagtagcaccagtctgtatgagaaaaggcaaggacaggtcagcctggcaaacagtgaccgacatacacacacttaaccctaatctcttcccgccactgccatctcctcaatctatccattttgagccatttgcaaagtatctcctagctgagagttttatcctcctaggcccccacccctgattctcttgttcctgccatcctgcatgccccagtctctttggacaatccctcttccaatgtccttgcttcttgcaatgatgacacgtgtcttgcttcctttcctttctgggttgcccagaacaggagttactccctttcagtaaacagacctgagcagctaacacagagtttttcagtttcttcttttcttctttgactttctctagagtcccaaatactgaatagctgctcctaagcttacattatagtcagtcctgccatcctaccaccttttcccttatttgagttgttgttgttgttgttgtttgttttgtttcttgttttgagacagagttttgctcttgttgcccagggtggagtgcaatggcaccatctctgctcactgcaactgccacctcccagcttcaagcagttctcctgcctcagcctcccgagtagctgggattacaggcctgtgccactatgcccggctaattttgtatttttagtagagatagggtttcaccatgttggtcaagctggtctcaaactcctgaccttaggtgatccacccacctcagcctcccaaagtgctgggattacagcctcccaaagtgctgggattacaggcgtgagccactgcgcccagccatattggcactttttaagccttgtgttttttaatgtcccgttgaccaaagcaaatcacatggccaagcccagatctgagagtgtggaaaaatggactctatctcttgcagggaggagctgaaagttccatcacaaaagggtatgcatccagggatggcaagaatttgaggccatttttgtgatccaaggacagagattgtcctcggacataaaattcaaggctggcagtttttttgttgttgttggcacatcagatataccattgtcttgttttctggcttctgtagtttgtgttgagaagttggctgtcagtcaaactgcataactataaaagtaatcaacccacccaccagctgctttgaatgttttctctttgtctttgctttccctcagttttactatgatgtgcctaggtgtggttttttgtttgttttatcccgctcttggttcacgtgacttctagaaactgacttgatatatttcaccagtttggaaatatttcatccattaactcttcaaatattatctgtgccccattctttctcaccttgtttttctgaactccaattaagcatatattaggtcaagcatggtcgctcatgcctgtaatcccagcactttgggaggctgaggcaggaggatcccttgatcctaggagctcaagaccaacctgggcaacatagtaagacctcatctctacaaaaaaaaaatgaacaaaattagctgggcatgattgcatgtgcctgtagtgctagctactcaggaggctgaggcaggaggattgcttgagctcaggaggtcgaggctgcagtgagtggagattgtgccactgccctccagcctgggtaacacagcaagaccttgtcttaaaaaaaaaaaaaatacacgcacacacacatatatgagaccttctttctgtatcccctatgtttcttacctccttttgcattgtcttttaccacctttttacctctccaagctttagtctggctattttcttctgatttatctttctgtttactatttctctcttcagctcttgtatatcccacccattgagctcctaactttaatttgtatattttatatttctaaatttttcactagattctttttgtagtttcaaattatctgctaaatttctcaattctgtcttttgtttccttgaattattaaatataattattttaaagtctgtatctgataatgccattatttggagtccttgtggctctatttttattatattacttttctaatttcatttttattaaattttcttttctccttatgacatgttttgtttgtttttaagacagggtctcacactgtcacctaggctggagtgcaatcatagctcactgtaacattgaactactgggctcaagcaatccccctgcctcagcctcccaagtgctgggattacaggcatgagccaccatgctgggccttgtcctcgttattttttattgagtgctggacattgtgaatggaaactataaatcatttgaggccaaggacaatgttatcttcctccagagaaaatttacatttgtttctggcaggcagctggggcactagaaatcctgatcaccttaatccaattttcagggattgaaagagctcaaatcttgactacagtcccttaggggacagggatgcagtcctttagagggctattctatttccagtttacacttattcctagacctttgggtttccaacccaaagcacgaggagcttactagggccttcttccttggtgagccctgcactctgacttttgacccctcacctcttaagtctgctaactgttctgctcagcttcttgggccctcagctgtctctgctggaattagcggatggccataggggataagcagccttaaatgctgagctcatctctcagctcatttcctttctcccatatcttggtcccatatgcttcactgcctattatcacttggatattttcaagcaaatattttccctgttttactgagtctgtttagttgttctcagtggaggttgtggttcaaattacttattttgtcattgccagacacagaagtcattcagcactaggttttaggctctatttatattgttgagtctacatataatcttgcttccaagtactgcataacactccctaatgttttatctgcttccttagtcactacaaataatgctaccatgacctttgtcatgcaggccattgctctgtcacccaggttggagtgcagtatcatgaacatggctcactgcagcctcaacctcctggactcaatggatgctcctgcctaagcctctcacgcagctgggaccacaggcataagctaccacacacggcgaatttttgtattttttgcagagatgaagtctcaccatgttgctgaggctggtctcaaactcctgggttcaagtaattctcccacctcagcctcccaaagtgccacgattacaggcgtgagccaccacgcccagccaagaatttttgtgatgtatccccaagagcagaattacagagaattaccaaaattacccaacctagtgtatacttaattgatgagatactgacatattgttctccagaatggttgtgttggtctgtatctccaccagcagtacatgagcgctctctagccacacatccctgccagcatttgctattgcctgcatttctaggtgtgtgtgtatttgtcaatctaatgggtatgaagtgatactgttgttttgatttgcgttcctctgataatcaatgggcttgcacatcttgggtgtggcatgtctgctgctggtgctgccaacacttggtggggcatgtagaactgggcctctgacctccgaggaaggggtgtcatctggcgggttccgagaaggccgaaatgagctggagcctgaaaccactgctgctgctaagggccaactgagactggcgctacagcaacaggaatggaaaacaaacaggaaggagcaagacccttctctccttcccagccttccagtctccctctagtgtcccagttggtggaaactgacaaccagccagaagacaaagaaggaatgtaggttcagagtcccagcgccagcctcacaaagcagagtatggcaccttccccgcccctgcccctttggcttcgcaacatcagttcgaagccttcttgcataatttgaacttccctcagcagtaatgacaactttatgtttctgcctaacaagatccttcatacaaatatgctcctaccctcttctcaagaggggagacataaagtcccaacagtctttgtaatcatctccaaattacagtcacggtattggtgatattaatttctcctttaaataagtcatagtaccacttaactattctgtgacctagaggctaagttgtaaagtttaccatcaaaacaactgctattggccaggtgcaatggctcacgcctgtaatctgagcactttgggaggctgaggcaggaggatagcttgagcccaggagtttgagaccaacctgagcaacacagcaagaccctatctctacaaaatattacagataaaaaaattatccagtgtggtggcgcatgcttgtagtcccagctactcaggaggctgaggcaggagaaccgcttgagcccaggaagcggaggttgcagtgagccaagatcacgccactgcactccagtctgggcaacagagggagattgtctcaaattaagagagagagagagaaagaatcaaagtctgtaagtaccgtttcgtgtcagagaggaggagagatggcagagcctttagggaagactgtgaagatgtactgttggccctgccaggttaaaagaaatgtggtctttgaagtgcaaatacataagcttttcaaacctgagcaataaaagaaagtgctctggtggtcttttctctggtgttactatttgacagggcagtagcaagctagacgcaggggctatgacgctttgcttcagtaaagtgactgcgtctgaaacagcagctgcaatcaattcacctgcggtcattcttgaagagccatccaccttctgccaagcaccaaatagacaaatagcatacaagagacatcacgactgcaaccttcaagttcaaggcactaatctctgctatttccctcagaatcgtgacattgggttcctttctctccattaggcaagggttgttctggcatctcactatcattgaatttacgccacagttgagttccagtttaaatcaaccaaccacataggctgttagagtcactttcagctgcatggaccaacattaaatataggccctctggtaaatgcccccagctcaagaaattgtgcccaatccaatgttatatccatcccttttggtagaacatccttagaattcacttccacacatattcgcccaggtttttgccaatatttcttaacgaaaatcatgttattgttctggtgtataggttttcctcttgtgttttagtgtgtacctgtccacctgtggtggattgcaccctcattatgggacagggggtggttgtggtgggttctgagaggagaatgggtatcctcttgcaaggcaccagagggctaccaggtcagccctaaaaattctcttactccttgtacctgcagggctaacagtgctaaatcaaacacaaactttaattgcttgggttacagaatcgcaacgtcagttgattcccagcctcgccacgtgtctcacatgaaatgtcaggcagtggtcgggaggagtgagaccctgaaacttaccattgctttcaagctcaaggacgcaaacaaaccaatctccaaaccccatctttcaggatatgattcttgacaccactccagctgccaattttgctatcagccaggatctgatcaggaagtagaaaggatgacagctcctcccttggtgcatgcagttgagatttcaagtgatcttcctgccttggcctcctgagtagctgggactacaggcatgtgccaccacaccaggctacgttttgtattttttgtagacgaatgtctcgaactcctgggctcaagtgatcctcccagctcagcctcccaaagtgcaggcactgcaggtgtgagtcacagcacccagcctcctctgtttgaagagtcctaactcccttcgttccccagcctgaggggctgtgttaatttcctggagctgccatagcaaagtgccacaaaccaagtggcttcgacagcagaaatggattctctcacagttctgcagggaagaagcccgagatcaaggctgtgagagagcaggaggatcacttgagcctgggagtttgaggttgcagtgaaccatgactgtcccactgcactccagtctgggcaacagaggagattctgtcgaaagaaagagagagagagagagagagaaaaaggaaggtaggaaagaaggaaggaaggaagggagggagggagggagggagggaggggaaagaaataagaaaagaagagagagagaaagagaaaggaaggaaggagagagagaaagaaaggaaggaagaaaagataagaaagaaaaaggaaaggaaagaaagaaggaaggaagaaaagaaagaaagagagaaagagaaaaggaaggagagagagaaaggaagaagaaaagagaaagaaagaagaaaaaagaaagaagaaagaaaacagaaagaaagaaaaagaaagaaagagaaagaaagaagaaaaggaaggaagggaagaaaggaaggaaggaaggaacaaaggaaggggaagaaagggagggaaggaaggaaggaaggaagttggttagagagaggcccacagagctgaagctgggtctctgaggtctgaggtgggggcgtggcctagctagttgtggaggagtgagctcagtagagggacttgtggggctgggatccagacctctaaggagcaggggtctggctgatgctggggtctctgagctcaggggatggcctagtactcagattttggagcatagggcactgggtgtccggtggtggtgtctcagaggtgggatgcaatgaagctggtcttgcaagtgttgagagatctgaaaattggcttcaggcagtgccacggaaatgaagcacttgctgcaagggtgaagaagccttgttagatggtgcgcccaggaaggagcaggtcccttcttcctcctccagtcttgtgggctcccttaaacgcccccagctagcagagcctaggagggaggcgctggtaaagcaggagcatcaccaagcagaggacagcaaagggggtggcacgcccactccacaagccagcactgctccttctagggcacggatctcagagaaaggactgcatatgcccactttatccatgatggctaccattggaaacaacccacacgtccatcaacgggggaatgggtaagtgagtcgcggtgcatgcgtgcatacaatggctactagtcagcatcacagagggaagaagggacacagacgtcaacctggatgagtctcatggaagtgattccagaaagaagccggcacaaagggctccagagcgtgtgcttccatttccatacccgtcaggagcaggcgagaccatctacagccatagacggcaggacagggcttagatctgcagccagggattggctgcctggaggcacaaaagcattctctgtggtgatgcaaatgttctttagttggtccaagttgtggctgcatgtgtggataggcaggtgaaaaaaccaggcgtgcacttgattttctgcacagtaatcctcaataaggacttgtttcacggatttttagggcagtggagttactctgtatgatactgtaagggtggatccatgtcattatacctttgtccaaacccataaatggacaacaccagagtgaaccccgatgtcagctatgggctttagttcatgcgagcttctcactgtggctcaccaattgtaacaaacgtactacactgactcgaaatgttcatcatggggaggcgtaaggggagtgacggggtctgtgggaactccttactttccgctcaatttttctgcaaacctaaaattgctctaaaaagcaaaatgccttaattttttaaaaacccaggaaagcagcccagggccgatgtggcagctccaggtgctcaggccctcgggctgcctttgttgctgttccgccatcctcaacgtgcgacttccctttggtgcgacaaggtagctctccccatgatcacagatcacatttgcctttcagctgtaaggagacagaaagtggctggcacaaggccatgcgtggtggctcacgcctgtaatcccagcagtctcggatgccaaggcgggcagatcacctgagatcagtagttcgagaccagcctggccaacgtggcaaaaccctgtctctactaaaaatacaaaaataagctgggtgtggtggcgggcgcctgtggtcccagctactctggaggctgaggcaggagaatcacttgaacctgggaggcagagggtgccgtgagccaagatcatgccactgcactctagcctgggtgatcgagcgagactccatctcaaaaaagaaaaaaagaaagaaagaaagaaaggaaggaaggaaggaaggaaggaaggaaggaaggaagggaaggaaggaaggaagggaaggaaggaaggaagaaaggcgccagcacaggtttgccctgcaggtatgggtgcactcatgccccaccaccctactgggtgcatagaggctgggaaatgggtcttcagctgagctgccatgtccccaagccacaaatctagtgttatggaagaacagaaaaacagatattggagggcaataagtggacgctgttacaggtggggatcaagggggacaatgagtgtagaggagtcttgaggggttttgctgtaaacaggagcagtgaaacggggcaagagccagggggcatgcggaggcaggagcgggagcttccggtgatagaagctccaagggcatgttggtatgctgctgggcctgaccccacagggagagagaaaaattacaggtgcagaaaacaggaggagagagggggtctcaggggtggcagagaccactgcacatggtgggaagtgttcacctgagggggctagggctggggaggggacagatttgatgatgggaactcaaggaaagaaattctcgtcagatgctctcaacttgctcagtgaaacatgaaacaaagttctcaccttgaaagtgcagggcctgggggctgaggggaaggtgtgaggccttggagaaccagggaggaaactctagaattcccaaggaaggctggctctgcctgggtccacttgaggcttgtggtcataaatctaaggtgcttagtcctgggctgggtgtggtggctcacgcctgtaatgccagcactatcgggaggccgaggtgggagaattgcttgagcccaggagttcgaaaccagcctgagcaacatagggagactccatctctacaacaataatttaaagattagccaggcgtggtggcgtgctccagtggtcctagctacttgagaggctgaagccagaggatttcttgagcccgggaagtggagggctcacctgtgctgggttttctttctttctttctttctttctttctttctttctttctttctttctttctttctttcttttttctttctttctttctctttctttccttttctttctctccctccctcccttcctttctttctttcttgcttgctttcttgctttgtctttctctttctttcttctttctttctttctctttccctccctccctccctctctctctctgtctctctctctctttctttctttctctctttccctccctccctccctccctctctctctctctctctctctctctctctctctttctttctttctttctttttctttctttgtctcgctctgtcgcccaggctggagtgcactggtacaatctcaggtcgctgcaacctgatttttttacctgcctatccacacatgcaaccacgactcggaccaaactaaagaacatttgcatcaccacagagaatgcctttgtgcttccaggcaaccaatccccagctacagaggtaagccctgtcctgccatctatggctgtagatggtctcacctgctcctgatcacgccactgcacttcagcctgggagacagagtgagaccctgtctcaaaaaataaataaataaggtgctttgtactggtttagagggctgggtaccccagagagaacgatgccaccggggcacatcatgagtcttccactgagccatggagctgtgtcccttgagacaggggaagaggctcctgccgctggccacactctactctcatgtttgagcagtgaagggcccggccatggtgacagctaagcttggtctcaggaggccagcagaggcgaggatcctgagccccagcaacaatgtgacagcaacacccaaggcagccaacagccaggcctggcagggtgggtggaaggcccgggctctgggaaggggcagggaagcatcaggactgtgtggctgggccacacccgggcccgcctggcaggtcgctcctagcacctcccacagtgtgacgtggacaggggaagtaagtgttccgcgaaataacaaaaggtgctcttgattttcaggttttatttgcctgttataattctgatattatgtacatatatatatatacttttgtttttttgtagagggcttatcagtagaccaagcacaggcatacagggaggctgtggctgctgagcagtgctgggagaaccaatctttcctttttttttgtctgtttttatttttcctgggatgggttcatcaaagctaattgctatcaatcctagaaaccacctagggactcagacatctgcctacacactagtggcgtaaagggaaggacaggggtacaaactttcaaagtcacggtgtatttacattcccaaggtgggggcgggaggaggctgaggaagacaactgttcagacgatagggagggcagggctgctaaggggtcctggggggtgggggcggctggaagaggccggccagtgggcagtgggaggaggtgtgcccgccccgcagccaggtagtgacggaggccacttggatgttgtgtggtgggtaccgaaggcagcgtgtgtatggagctcctgaaagccggccatggggtgggctgggcggcgggaagaggcggtgctgccagagtgcgatgctgggagtggggggactctgggctctccagatggcctcccctgcccccgcggccagtttgcccggctcccatcccggttggagcagagatggcaaagaaaagacagcagatggtggggacaccgagttctgttcccagtcccagccaggctggctggggagtggctgggggagggggaaggtgccaaccctggtcctgaggagaccccaccatgtctgcccccagtcagggagcaagaaagacagcatttcggagaccctttcgggccacccctacttcttctcccccaaaccacagcctctctgcccaaatgggctggcaaaacagcacccaaaggcccctggcatgtgggagatctgcccaagctggggcagagcagcgtgtgcccaggaaggggtgcagctgggttttggcaataaagtggggaccgggtggtaggaaggggatccgaggcagcaagttctcctctgccccaactccagcctcccatgggcctgctggagagggaggggcctggatcccaaggccaggggcacagcatctcctgtcctggactccactattctagggccacggcagggttgatgggggaagtggcccctgagctgtcattgccccctgccgcctccttctccttcttgccactgtactggccaatgaacgaaccatcctcgttgaactgaacatccacgctgcccccataatcggccaggctgtcgtcactgcccaggggcttgatgtccccgttgagcgatggctggctgctgccaaaggccttctcctcgttgtcactgcagaggcacagggcaggtgcgagtgagagcactgccgagcccctgcaggagcctggctgggggtgaggcagacgcccgcctgccttccatttgtttagaatgcgctcagaaagagcagctctggccaccctggcaggcaggtctggagctgtcatctttgggcattccccagatcctggggactgtgagggagaaaatgtgcgctcggccaggggattatggggcctggttcctgtctgggaagctgtctggggcctcccttggggagaggggagcagtgaaggtatctgtgtggagaggaggggctggggcgtgttggcctctccctgaaatgaggagctgccgggcctgggggctgggaagtgagagtcctgtcagagccccggcagccaggggacaatggcacaccaggcgcacattgtctatagggagaccttgctgttggcccctccccaccgcccctgccttacctctccagggacctgaagtcacccggcagcacagagaagagagagagggggtgagatgtgaaggccagggtggagctgagtgccagcacccactcctgccccggctcacctgtactcgccgaaggtctcatctttcatcggtcgggcctcagagtccacctgggtgtcctccttatccttcactggagacacagagagggacagcttcttctcccgccccagcctgacccggggctccaggcccctctacgccccgcacccccagcactctgtctcaacagcgcccagaggcaagaggccttgaaagaaaccgctcaccccctgcggtccagccaccacttgcctgttgccccaaccccggcctgggaggatgatccccctgcctgcccccaccatgcgcctgtcatcttgtggggagctcggggaatccaggaggccttgcagaagggtggaaggggcgaggtgctcctctctgccctcggctccacccccgtcacgtggggctcagaggctacctgagtatttgccgcccttgctgcgcttgatgaagcagaggatgagcaggacgaggagcaggaggatgatggcactcacaaagccgatgaaccagccctcagtggcgaagccagcaggagggagcctcacgcggcctgagggtgagacaccagccccccgtgctgccgcccaagccagaacccgacctgaggccctgaagtatgctcttaaagttggggccctctggggggctaaggagtgacagggacagggaaaagggcatctgcggaaagggtatgaaagggggctgattcggggacacccagattctgggaggagaagcagacaggagccgtggagggagcctgggcagtagtggccattcaggggacagaaggacatgaattgtgcagcccccatgcttccctggcaggtgatggcgggcccccggcgcctcacctgtgccattggtcttcacagccatttggtgccggaacatcctctccttaaacaagtggatctcgtagtcagtgtcaggctgcaggtcccactgcgtgtaggagctctggttgtagctgacatactgtggcgaaagggaagccccacccttctcttctgccagggagagagggtggcagcaggggtgagtcggagtgccaggcaacccctctggcccagagcccccttccccaccacgccccaaggccccctttcacgcttacctcccaaggctttgaacaagatatggaacctgaagttgcactggccctccttggggacccaggagacgacactgtagttttcacccgctgtggctgagatgttgccaaaatctgagatccctggggggatgcaggggaacgaggagagtgtggcagctgccaggaagtctaaggccctccctcctggacccggctggccggggcctccctgttggcaggtcattcctccagcttaccagacaaggccatagtgcctccttcccgtacgatggcttcaccagggccctctttggtggtggcctgaagctggaagcggtaccgcaggtgggggctgagatcggtcaggttgtgtgtccgaagttcggggtcccgaaggttgaaggacagttgccccttgcccccctcatccactgtggggacagacaggggttggctgtggctgcagctctgccccctccccgtggcccctccacctcccttccctgctggggcggcgcacgcacgggggtggtaggagagcacgtagccggtgagcacgccgttgtggctgagtgggggctgccagcgcagcagcaggctggtgttcgactggcactccaggtgcaacgcctcggggtggccaggcactgcagggcacagaaccgagtggcaggtaggtcctcgcccaggtctggggaggagggcaggggatgaggcgtggggtgcaggactcacctccctctggggtgctgaaggtgaactcgctggcgggccccgatcctcgcccgttaaaggcctgcacctccaggtggtaggagctatagggccgcaagccactgaggatgacactggtggtgttggcgggcaccaccacatggtctttgtggatatgtctcttgctgtgcttcctctgactgccctccctccagtacgtcacctgcacaagcgaacaggagacctcgcaggggcagaaggcacccagcagggcccccagcgcacacccccaccacccttaatggggaccctcctctcaacccaagtcttccaggagagcggctggcaggtggcaaagccccctcaccatcctgtcgctttacctcagtgatcaccctcctgggcccccatgccttcaacccttacattgtatccgcggaggtggcccttgacctgggccaggtccaccggccgccacttgaccagcacggcacttgagttgaggatttcaatgccttccagctcagggattgcctgggggtctggaaaccaccagtgacttggatagagccataggctctcaccccagccctgaggccaggcccaagcccctacacacagagaagacgaattcggatattttatgaggtacagtttgaggaggagaggtgtgtttgcatggtctcaagatctcttcctggactgcttattagttgcaaaggtgaaaatagtagcttatacaaaggagaaaccatggctgggcgtgatggttcacacccgtattcccaacactttgggagacagaggcgagtggaacatttgaggtctggagttcgagaccaacctgatcaacatggtgcaaccgcatctctactaaatacgaaaattagttgggtgtggtggcgcgtgcctgtaatcccagctaatcaggaggctgaggcaggagaatcgcttgaacccgggaggcagaggttgcagtgagccaagaccgctccactgcactccagcctggatgacagagcaagactccatctcaaaaaaaaaaaaaaagaaagaaaagaaaagaaaagaaaaaagaaaagaaaaaaaggagaaaccagaaaaaaaacttgaccgggtacttcaagttaccatctggtcatgttccagattcaaggaaatgaaagaagcagcattggctgatataactggaataccgctgccaattatagaaatgtgaagtgtggggaatttcataacgtcgctctggttatgtaagagaatatcctcatccttaggaaaggcgcacaccaatgctgagaggtgtggacatgggctggggtggaagcaggcgagctcaaccgtgggcgaggggccctgccggatactcacagtcctctccagagtagccgatagtgacctggggctctggtcccttgccctggctgttgacggcctggactttgatctcatagggcacgaaggtggacgtgttggacaccaccaggaaggggtcgctgacaatctgctcctgccagggccctcgtgtcccctgagggcgccactgcacgcggtactgaacctggggggcgttccagtccatccaccggagcggctggaggaggccagcagaagaggagttggttggccaagaacaccagcattctttggcccgccccccagcacaaaccagcatccccagacatcagccccttcctttgcatagccaagggggagcaacagacacccaggtcatggcctcatgtcccccaggcagctcagcccagggactctcaccttccacgtgatgaccatattggtggtctcatttccttcccccttcacatccacagggttcttctctggggctggaaaggaaagtattaacacatcaatgctgcagcctcttttggagagccacgaggaccgagggccaaggaacaaatggctcattctggcaccaagggagtccagccccctcgcgctccccctggaaatttggaagcagaggaacttgggcatggcacctctctaagccctcccttcacagcccggagcccttccaggtggcatgggagtgggtgccaccctgactcacctgcctcaggtgtgaccacagtctcagagaccgggctgggctccccggggccatatttgtttatggcagtaaccctaaaggtgtagtggacatagggcgacagcttgagggtggtagaggtctggttccctggaaccttgcccagactgtaccatttttcaggcgccatttccttgtcctcaaattcaatgtcatattctgccaagaaatgaaccgacaatggagtgatcagcatgtggctttgggggaagggctgtggaggggttgggtacagtctgggtccctgattacccaggccaactggcatctccagattcccatgaggaaccgtgagtccccccaaaccgtgtccccccaggaaggctccaggaggagggaggaccccaggaggggccagggctggcagaagtgacggtggggtggcactgagctcaagcctcttactctcaatgggggcattgtggtcttctgcaggactccaggacacgcgcacctggctctgcgtcagcaggtgcaggtcggacagcaccagccgtggcaccggcccagggctccctgagggtggggagggtcggtgcttgaaagggcccagggatgtgagccccggccttctggagtggaggcttccaccctaggacttacccaccaccaagagctgtgccctactctccaccacatccagttcggtactggccacgcagctgtagttgccctggtcgctgtagtccaggctgtggatgaccaggcgcccatcctctatgaagtacctgcggaggagccgtgtctgtctttcctgccatctgggctcttctcccctcccatccctccctcctgtctccttcccccgctcctgtcagagccttccccatcaaagcaaggacgaggccaagaggtctggacttccagcttttcccactctgccccctttcaccgtcactgtcctcacttgtcactgtccccaagctcctggaggtctcgaccgtccccacgccaggtgatgctgggctgcaaggaggggtcaaaggaggcctggcacgtgaaggtcaccctggaacctttcttctcgattgtgctgcggggcccctgagtgatctgagttgcatctgagggtaatgcgtgcgtggggaagtcactctgttgtcctccagaggcccagaccctccctcccagaggcactgccagccatgtggcaagggttgcctgacctttaaccttcaggttagccatgatggtaacattgttttggtcattggcagccaggcagaagtagcgtccggtgtcattggcctggaggtctcgaatgcccagggtcccattggcataggggaagaagcgttcgtcctgaagcactgttgtcccatcctcgtccagcctggagggagcagggcgggcctggctctgactggctggcctgggctccctgccctccctggctccctggccactgggacacgacactcaccactaccaggacgagacactcaccactgaacactgggcacaggcgctccgaaggccttgcacagaaggtaggcagtgctgccctggacagccatgtacgtctgattgtccgcagtcaggatcttggctggcagctctaggggaggaacagcctcaggagacagggcaggacttgggaccacagctgggccaggagccagggaccctctgcacggcttcctcgggcccccaagagccctgcaaatcttggttccctgctcccagctgaggcccccgccaggctgtgtctctctctgccttcagacactgccctctgcctcagatgcgcctctggtcacagccacccaacttttacgttattccaggcctaactgacagtcacctctccccagaagccttcctggcctagtccccagccttccctgaagttccaggagaggtgccacctgggctggccttggtcacatcctgtggcacagcggtccgctcagtcacagtgacaagacctttcccctcttacatctccctcggctatcgtgaggctgagtgagatggggcgaagggtgtcagcaaggagaaaggtcggcgccagcctggtaggccgaggacacatcagctgccagctgagccactctggtggcctggcccagtgggctgcagggacagactgggagttaggaggtaaggaagggagggcactcacggacaacgtagatgtaggcattggccagcaagagcccgtgccggttgcgggcctcacattgggtcaccattgtgtcactgggctgcacgttgctcaggatcagggcgccacgctgaatccggtacttctggtctttggccagctctgtgcatgcagcaggtgggcccatgggccacagcccggcattgagctgcgttgaggcccttcctcaccctcctcttcctctcccccacagcccccagggctcgccacactccccactcctgcctgaggccctgctcaccctccacagggatcccgttgattctccaggtgacctctggttggggcctgccctggacttggcagtccaggcgggcagtctctcctggcccatatagatggctctggggcttgtgcagccagtacggggcagctgggaggaaggggagagccgccctgagcccgcagccagcagctggctcttgacccggcgcagaccctcccctcccccatgacagtgggcatcacaggccactgtcccaggaggtccataccctccacggtgacatagtacgcatgccgggcactgcccagtgagttctcggccaggcagcggtactcgccatcatcctcctcgcccactttcagcagctgcagggtcttgttgtggttctggtaggtgacacggtcggctggcatggggccactggggcgcagccatttgatggtgggcgtgggactgcccgggaggcaaagggaagagagcagaagggagaaaggacaaggccaatcaccccagccccctataccccgcggtggtctgagctccctgctagggctccgccaccctgccctgccctgccctgccctgggttcccagactcacaagccctcggcgatgcactccaggaccaatggctgcccctgcaaggccaccaggtggctgctggagttggtggggaagagcaggcgcggcttcctgtcaatcatgctgttggctgccaggagaaagtgggtgggtgggctgcccactcttccctccaccccagaattgcaaggctgagggactcgacactccagccagcccccggggcctctgtgtcttcctccattaaggagagtgtcctgtctctgctctcgacgcctgggaaggggtctgggcagggtagaggtgggagccaagctgttcttgaggaagcctggagttgtcagatggacctatggtgggaagggccatgcctgagggtgaaaggagtcagggagagagtgcagagcctctgagactcactggccttgacccggaggtcaatgggttccttctgaatgatggtcctggtgcctgggaagtgggcgtggcagatgtagtctgagtggttgtcggaggtgagcacattggcaaagtagaggttgccgttctggcccatcgtcacccgctcgtcctgcttgatgtgcaagatctctgcagggggcaaggaggccgaagtcatgaccccgtccaggaagacacccccgctaacaccccgaccccacgaggcagccgctcgccggcacccactgctgttcatccagtagatccggagaggctctgcacttgggggagggttgcaaggcagaaccactgactccccttcctccacctccacgggcttcactgtctcctttggccacttgggggcacctagaagggacagacgggctgacactctcctcctggtccagatggtgctaggcaggagaagggaggtgggggcaggggggtggcgggctacaccagggatggacgagggggcgagagggtcaggccagtagaaacttcacagaaaaggaggcagacactctggataccttctggactcatagcagagactagcacttagggaggccagggtgagcaggagaccaggaggccaggaagggttaaccttccacggttctcagctctccctgcccaccctaggaaaggacgggtggggggaggctgaggctgaggtgcagtgatgggggaggggagctgtggagggatgcaggagtcacagacccttccatcatcctgacacagaaaccatggcaacggttcccaaggtaactggaggggtggggaggggagaggagagcgctcaggaagcagaaagctcagggaggatggaatgcaaagggaaaaccccagggaaaaggcgacacagatcaagacagagccgtggagcaagagagaccaagtcggaggtggaggggaggagatggagagccaagtggaaaagccagagaagaggggccctgctaaggagtgcaggtgtagacagagatgactgcagtgactcaggcaggtctgcccagaatcagtcactccccccaccagcccgccccccccctccccccccgccaccttcctgctcagccatgaggcaggcaccaggaaagcctgagggagtgaaagggcatgagatgaccggaagtgcaatggagacagagacagggcaaaggaggagactgcacaagaaacaagatgggccaggggagaagctggggtggggtggagggctggcaggacacccaggcccctcgccacgagacaactggctgacagcagcttccagcccacaatcccacacgaactccgggacctgccctccctggtccctgcagcgcctcgcaccctcggccatgagccggatctcatgggacatggcggtgcccagcttattgctggcaaagcagcggtagatgccctggaacctctgagcaaagttgctgttgttgcccgtgatggtgaaggagccagagtggggcgactggtacacggtcacacccagctcttccttgggtttgaagtggacaccatccctcgtccagcggaacctgtgggcggaaaaaggcccagaggcctgaggccctggaacccaacgggggctggaacaggctggagggacaggtgcaagcagccagggcccccaggggatggactgggagatggcgaggacttggggtgattagcaaggtttggggcttctgggcttagaagttaggcagtccagggaggcacaaggccggggtcagtggcaggcaacaggggctgagacggcagagatcactcactgcacttcgggcttgccactggcctcacacttgaggctgatgtcatctgtggggaagacaaccaggcgccgtggagactgttccgtgatgacaggtggctccatcactgaagacagggtggagagagcggtggtgagggtgctgcctggctggtgtcatagcctcagcacctgtcccatcgtgagggaagcagggtccagagcccctggaggccccatggccacagggggacgaacggaggggaagaacaaaagaggcttgtgggacatgaaaagagggagagaggggacagccacgtaagttacaaagagatgcctgagaaagacaaaaagggtatgacagaaagaagcgggggcaacaaaagccaagacacagaaaccaagaaggacaaaccccagacaggggagaagggaccagagagaatggcagagaggaacagtgagggtgacagagtacccaggctggggcagagacagaacaaagccagccccacacaggtgagagaagcacatggtgctcagggagagccgagcagggccccggcactcaggagggcgggggtgcaggctcagctgagggcctccttacccttctccttggccttctgggaaacactctcacccctccccaacttaccatggtgtccttcatctgagaaatccaggcaggcagcaagggagggaatggagagaaatactgacaggcagccccagagtggggcagatggcaggggacatagtaagctcctgcagcccccccgtggagagggaatggcaggagaggaggccctggcagtggcaacaagggggcacacgctgggctggagcagtggcaggtcaagcccagggagatgggacagagagatgcccagggagaggagctccactggatagacacacagggcatgtagcccagaggcagccaggccatgcctccagctctagcagacagggagagagaaattcttgcctttaacaaggagtgtccttgcagccccctggcagggcctggcagggcctgcagaactgaccccacccattcaggatgccttggaaggcaccgtcccctgctccagcctgcttccctcctaatccaattagcacagctgagtgttttcaattaccagggcccagccttcagagccctgctgccccctccccctgaaaactatcccaaaggccctgctgcctctgagtttccatagcctgcggggttggcgccagccctcctcttctccctccttcctcccagacagccaccaagctctctggggcagaggccagagctgctgtcccagccccaggactctgcagagcactggccagggcggcctcgaggaagggagaagagggagggagggagcagcaggctgcctctgaaagctttgtctctgcagaagacctcagtgtgaaggtccagggagggaggagggggctccctggggacactgcagagggccctgagctggggagggagatggtgacagggatgacaggatgcagaaagccaactaggtggaggaagcaggaaaagagacaaagggggctggagtggctggggagggagagatggaagacaggttccaacagggagggccggctgcctgccactgcccactgtgtcgtatcagggtcaagaacaagtgctggtcagtgaccagggcagccttggagctgccatggccttttggcctagttctctctccccactcccatctttctgtagagaatgcacggcttgcattccactgtacagtgttatattgtgtatccacctctgtgtcctctgggtctaaaagcctcactggtgtgtgtttccacctgtgtggcctctcagcggctctgctccttcatccctgcacctgccttgtcttcatgcacctgtgtgcatgtgtccatgtgcatctgtaccaagggagtctgcctggccctggccctccatgtatgtgtctaaggggccagcccctttacctcctccaagccctcactgcctcccaacgccaggtgcctccccagcctctctctcgcagcccctgtcccactgctggcacagacagtcttcccaacccctatccgccaactcgtctctcagtgacactggcctcctccttgtccaggcccagagacaaaggtgtcaaggtgaggctgggaagggactggagcctggtagctcaagagacacaaatgccctcacacatgataccctgtgacatgcccctcacacggcctgacagctacttacaggagaaaacaccatcacggtaacaccccccacacgcaagtgtgtacttacattcagccccactcacacatacacatgacccaatgcaatcaaatgtcgtggtcaaatacctcccgacctccacaagcctggccagtaagtaacagagtgactcacacagtcacccatgtaaggaagtcaaaatcacattcacgaatatctacgctcagtcaatcacaagaacacacagacatacacagtgtatccatgcttaatcacaaccctacggccacactccccaacatccactcacctgcttgtgcccccaacaaatgttacaaccatagacacatgctccagcagccctgcccccacccccaccaaataactacacacaaaaaagggtccagaaggctgctgggctgggaccagggtttttcaagccaccttttcctgtctcagttcagagacagggtgaccaagggcccaggaggggaaagagaaatggggacaagacttgaacacaggcctttgcacaagccagctgagggctggggacgaccccattctcctgctgccacacccctgtggtgggggatggaagcggaggagtcggagtggggcgggcagagatggggcgggctaaggagagcatggaggaggcccaagacctcggggccctgctccaggttcgctgtccctggtgctgaaatcgccccggcggccgcgcctgtccctgtccatggtcctgacacgccccgcaccttctaccctgcccttctctccgggggtacccaacgtcctggctatctcctgcccaccctgtgcccaggaaaggccagggagaggagtcagggtccggaacagggagaaggtgaggaggtagaagataaagaggggcccaacatagcggcgaaggtaggcgcccaggctcccttcagctactcacattcctcggggatctggataagcaggcaggggctgcagaggaggagaggccacacgtaccgcagcgccacgaccatctttcccggcggcaccgcgcagcacagccagccgggctcggttcaggctccggccggaggggaagggggctggtgggcggcttggggcgggagttgggagtgggggcactgggagaggggagaagggaagggaagggtgggggaagagagacgagagaacggaaggacgttagtgactaacatctgggtaagcccgggctcttggccccgccctcagccccgcccccagctggccggcttctccagccctcccctccccatccgcacccctccccaccttggagggagaaatctggaagagatagccctggctgggcctctaggttgccttttattccctctctactctctgtctgcacctttcctgccagctgccttcccagcaccaacttgttgccccatcagctcccctgtgcatggcatgcacatccccgtatgtgtctgcatgtgcaggtgtccgtgggcatgtgtgtggttgtggatctgcaagcagggagtgagctgtatgtgagctggtatttctgtggtgtgtcttctctgggaggggttgcactcatgagtgggtgtgttagtgtgtgtgcctgagggaatcaacacacaagtctgctagctacgtgtgtcttcttgtatgtctttatgtatctgtggggatgaatccctgtatctattatctctgtgtgcacacacatgtagagaagaattcttcttgcagtcacattgctatagctttcagagccaactgatgcctgggtgctgtacagacctaaaaagctaatggggggattgggaagtgggatagagaagggaggaaaggggcccaagatggcagcatttcacaaaatagtttcaggaaaatgaagaaagaatggggaaagggccaggcgtggtggctcacgcctgtaatcccagtagtttgggaggctgaggtgggtggatctcttgaggttgggagtttgagaccagcctggccaacatggcggaaccccgtctctactaaaaatacaaaaagaaaaaaaattagccttggtggtgggcgcctgtaatgccagctacttgggaggctgaggcatgagaatcacttgagcctgagaggcggaggttgcagtgagccaagatcgtgccactgccccccagcctgggtgatggagtgagactctgtctaaaaaaataaataaaaataaaaataaaaggccaggcacagtggctcatgcctgtaatcccagcactttgggaggccgaggtgggtggatcacctgaagtcaggagttcaaaaccagccaggccaacatggtgaaaccctgtctctagtaaaaatacaaaattagggctgggcgtggtggctcacgcctgtaatcccagcactttgggaggctgaggcaggcggatcatgaggtcagcagtttgagaccagcctggccaacatggtgaaatcctgtctctactaaaaatacaaaaaaaaaaaaaaaaaaaaaaaaaaaagccaggcgtggtggctcatgcctgtaatcccagctactcaggaggctgaggcaggagaatcacttgaacccaggaggcagaggttgcggtgagcggagattgcgccattgtactccagcctgggtgacagagcaagactctgtctcaaaaaaaaaaaaaaagttagcctggcgtggtggtgcattcctgtaatcccagctacttgggaggctgaggcaggagaatctcttgaacccaggaggcggaagttgcagtgagccaagatcgcaccattgcactccagcctgggcaacaagagcgaaactccatctcaaaaaaaagagagaaagaatggggaaggaagccttcccttgagaactggtgtgggagaagagaggaaggaggaaaacaaccccctgctgctcctcagccccctgggggtcaagagaggccactgaggcctcctcccttccagatgctccaggttagggtcaggacaggggtcaggacaagctctgggacattttccgtgacagtgtttctaacacttcttgtgtgtctcaaagtcccaatttctaggtctttgtctgagtcttcagagctcaactgctgcatgtgtccaccccaaacccaagccacaccggccatgtccatattcacctacaagtaaggggagccaaagactaagggtctgaaagagggggctcctctgacaatgacaagaggaaacagactcccaagtggccagaccacttcaattccaaacaggaagtggttaaagtgcaggcaaggcaagaaagggtgttgttaggtgacagagcttggaggctgaagtcccagactagacgccttcattaaatccatactgtgcatcctccctctgcccagccaggaccttatcaaagcgggcaccgagcctcagcaggaacaccgaaaggatggtagagaagtcagccatgctgtgctaaggctctgggccttgtcagttttgtgtaacagagtgacccaagaagagctgtgaatgcggcagatcccgtggggactctgggcaagagcttgctgcagagggtggtggagaagcagcagggtgggtcagcgtgcatggcctggaggccaagagatgacttggagggtaagaagagtgattcccagcctgcaagagctggacctgggcccagaagggaagagcaacagtggatctgttccaccccggcctctccctacaaagccagtggatcaggggaggccccaggcagcactggcctcaacttcaaggcctgtaggagcagtaggagactcggatcagagagcagatgatcaaacagcagccttgggagctctgagcactggtcttaggagggggaggggaggaaaccggagcaaggaaaagctcaaagaaggaccctcctgcatgtcagaggcttttgggtgctctggaggtcgataatttctgccacgcaagttcctctatttgtcctccaaatctagaatcctggaatggtgtttggcatgtacgctcaggggaaatacaatatccccaaacccctggtccccgctccctgccccatcccagccccatcccatctccccacaggctcatatccaacttcttttttggtctcccagtatttgccacctagcttgccaccgccctgggcagtcggagacaggcaggaagcagccagaaggttgcgagatataacagctgggagggggcgctccctcctctcctcccactgctgctgggtctctgatctctcaccattcctcaggcaattacagagcaagcagctagggttgtcagctcagcaggccctctaccccccaccagcaccactaagggcaaaggagcggggaggggggagtgttccacagatggagccaaggccgggtctgccaagggtgacagacagagtgagaagaggcaggggggagcaggagacaaagacagacgtaggaagacagcgctaaccacgatggagatggttagggggtggggaaattccgaaacggagacccaggcagcagagaaagggagagaagaggaaaccggagcacaaagggtgagaggcagctgcagagtgcgccgctgagaaatggcagaaagagcgagaagagtgaggggtgggggtgggcgtgtgcacgtgcgcgtgcgcgcaggccgcctgcacagcgtccttgtccctgggggctgtgccaggcaaggggcggggaggagggaagatgggcctgggtcagtggaggggcttcccggcgtggacgtcacgctggcctgggagcagggtagagagacagacagagggtggagcagctgtgagctggggccggaggcctacaaagccccacgcaacagagcatcaagccctgcccacttgtggcactgggcaagggacggccgtgagacaggatgaatggcacactgctggctgacccatgccatgccagggaacaggtgggggtcgggggattcctgctgcgggtaggaacggggggagggggaagcacccagaaaatcccagggaagccttccaatattgctgctggctgggagtaagtggtcacctggctggaggagacgcacatgtgttaggccaagagtgagcctgcgtgaccatgcactgagtggacagtggccgctgtgctggggcagttgaagatggggccattcctgagtaagtccggtcccaaacccatcctccccggtgggaaagggccagggaggcaagggtcacgcccagcagcctacagggaggggttcagccccagaagagccttgccccatcccaccccacctggcctcccactacacccgcaggtccctcagggagtcctctgtcctctgctccaaagtgcctgctttggtctgatgggaagcagcttgccagggagggacctgggaggttgtggagcctggctagacctggagtgactgcctcctccctgaaaacacacacacacaccccatcaccaccaccaccacacaccttgagaagggaacctccagcggtgccctgcacatgtgccctgcacacctgcctgtcagttctcaggttctgcctggagttcctctcaaaggagaagcaacaagagagcccttcaacagcacagcagagactatccggcttctcctgcccttgtctcctggggacatggtgcctggtgactcagtgggccagagtgggggtggggctgggggctcagcacagggcacatgaaagggtcagagtgtggtgctgggcccatgtgcttgcaggcctgggagcctggggggcttctgtgcctgttggtgtgtatacgatggtgtgggtgtcacctacaccctgtgcactgtgtccctttaaggctcccgctggccctccccgccccgctccccaggccgtggctggcgggtttctatggtgatgcagcccaagtcccagaggtgggggaagccagaggaaagccttgttatgtgttatgtagacagcacataaagggggctgctccagggagcccccacaggtacctgggggcccagaagtcctttatgactgctgcttagtccctgcactcccaacctcacccctccctaagagggtacccttaggagagagtgagccctcagccccctcatctcgcctgaggcttcagtctccaaggcaactacaactcacctgtaatggaccattctccttaaaagatggggaaaagagacggaggttaaccctttgtggggttcagggaggacggtcttgactactggggaagggagggaggagccccactccatccccacaatcacatgcctctgtggtctgttctattaaatcaacttacagcgtggacttaccacgtaccagaaagcctcatgagcacttccactcacatccactcatctcctccccagatttgcctcagggagggaggtgctatcatcatccccattttacagatgaggacacggaggctcagaaaactggaaactgtgtccaagatcacagagctggcactgggtctcagcaggggtggggttttagagggcgtggtggctccctaagctgcctctcagaggctctggcatcccaacatgtgtgcctgctgggcttcccagggaaccaggggcctgggcgaggatggcctccaagccatcctgccccgtggggagggcttacttgccaggcagatggcaggcaaatgtcgggggcagggagtgacatcttgggatggaggccatgcggaagtaggatgtgatcaacatcacgtctcagcacagagctgaagcccgacaccaaacaaacccccaagtcccccatccaggtactcagtccaagagaaggccaactcctttcccttttgggcttggggacaggctggtttcttggtcccctcttctgctctctggaatctggacttgttctgatacctttcttgcaaccagaggctccagaacccctcccaaagaggcccctctccaatcagcatttagggacagcagtggccccattcttgtgtcgaaggagatactgatgcccagcaggcggcaaggcttcagcctccgagaaccctagaaggcgagagaaatgaggtggcagaaaactagggctcctctcaggccccaggcctcctcagggagctaggatgaccctagcactagagggggcttcagcggccaggccagaaggaacagactgcatccagttcctggggctgtggcctgaaaaggagagcagggaaggagcccagcctggggcagggagaggccctggcccacagcagtcctgggatacctagcctgtgttggtttgcggggggcggggtgggggtgcctggaaacagctcagacactgccaggccccacgggccccctccaggggccccactcccgaggggttaaagggcagagggggacacaggaagcccgggggcggacaatggggcctctgtgatccccagggcttgggcattcctaagtcatgaacacagacgcagatggctgggagacagggccacagggaacccccctccactgaagcacagcctgggttggccagaggctctgtccccatccagccactgcagcagccaccctcagccccaccccttcccagcacaggccctgttggggcatctgaggagacccacgtggcctcatgacaatatgtgtgtgcatgctggttcacgaacacacacacacatgcaaccaaatatatgaccccacccagacaaacaggaatactggaggttacacacacacaaatacacacacacaagcagagacacaaaccccatacatgcagataggaagtctgcctggctggagggcagggggcagaggggctcccgggactcagtccctttccctcaagttccactctcagacccgcactgggatggacgggttcagaagtcctctttggccaagtgcatggagcccaggacgctgccaccctcctgccccacccaacccctggccctcgcagctgcccctgctgggtgtaagggccagagatgagcaggagctgctgactgacagtggctgggcactccctctgcagctttccaacctgggaagaacacggggacctgggctgggggccactggacaaagaaaagcttctagaaagaacagcggccagaccctccccagctcctccctctttttccagccacagccttcaggaagccacaaagaccctgttgatatctggggaagaggcaagctgggcgggctacctcccccagtgctcgtctggctgctgctcaccaggcaccccccatacagccttccactcagacaaggcccccatggggggtctgggcccaaccccaaggcgtagagtccagcagaagggtgctgagtggctgctggacagggcacaacctcagggccctcaagggtgaggcaggggcagctgggggggacaaggagaggagcagagcggtggaagacagacaaaagggtaagcagagagatggagcagagccctgacgggaagggggaagagggaagggagggccaggcaggcagaggcagagggaggagacggggagtggtgcaccccatccccggcagcagcaggcttctgcctagaaggaggaggaaggtgatggccctgggggtggggcacagggagacgtgggaggctgcagaggagagagcaggggggcgggggaagcaggagaaggaggtgtccgagatgggccagatcagagcaagtaagacagcgactgcaggggcagggatgctgcaggcccattccagatggccccacccagggacccagccccagcccattgcaggggcagaggacagggcaatgagcaccctgctggggaccctagaagggcatccagaccccccgcctcccccactgtctgaaccacgggggagggaggcagggcccccactcatgcccccactcatgcctggcagaccagggtcttggctgggatccccatcctggcagacctcctcacaggaccccaccactaccccaggttctcccatgaacgtgccctcctggagcctgggccactctgcgaggccgcatcaccctcacacccagaaaagcactcagtgcagccatttcgagctttgaaagggaacttggtgatcaaggtagggcacacaggcctgtctcctcgaccctcacctgccagtcctggccaggtgcatgccaaggaaggcgccagctgtagttccagtggtggaaagggctcggacctgggagaggccgattgggggcacaatctgggcaccctgctcactgtaggagccctcaggccaggcccttcctcactctttgcctcccttttcccttcagataatcatcaagaaaaaagaaaacaagtgacaccccacgaagacagggacaatgctggtccagtttgtcactggctcttccatgggcagcccagagcccggcccaaaggagcactggccatgagcagctgcccagtacacgactgcccatcgtgggatcctgagcgcctgggtagggaagctcttcactggctgcagggcaggggaccccgccaccttgaagcgctgattgtcctcctgatgctcagcagggagctggcagctgggaacttggggaggagccttttaggagcgcggtgtagcaaaccagggaggctggggcgtgctgaacgtgtttccctcttggtgatcagatcactagcgattcttaatttcttttgttcttttctgtatatttcaagtgtcctacaataagatgtattactttcgggatcatacacacacaaacatcaataaatatggagagagactcagatgcagcagagagaaatgaccaggagccaaggaggtgggaaggtcccaggcccaaccctgccccaaacttcccatgtggccaagacagccgagtcctcaaaggctctggagccctcaggtgtgcacatgtgggcactgcatgggagctgtgccaggggagaggccaggctgggccaagtcccaccacctgcagcaaggagctgacgggaggggagaggccctggggaggcccccgccccagaaagatgatgctgggcagcagcccccaggggaagaagggcggactgcactgatttacgtcagggccacatgagtcagcagagatggcactgggctgccccgatgcccctgccctcagggtggggttaacaggggcagggtatctacctggggggtgccaggcccccactccttctggagaagggggcagatggctctaggcctgccttcctgagagggacagtgataggtggggggtccagataccctgtcgggggcaatggattgtagtgcgtgttctttgcaatccctgccaaccaagaggccccaaaagtctgacctggaatggagggaataggaatcgctgacccctcccataaccgcacagagataggaagatgtggcagtgggcaaaagacctgcagtgcgcagggaccgcctgagccagtgaggcccaccttccctcacccctacctgatggaccctacctgatggacacccatgcacgggaggcacagcagtgggtgcccgaaccgacctcacccactccagccctgactggccacagagcctgtggaaacgggctccagaggcgccctacgcctccggggaggagcccctggctctgcggcaggttttcgggtgagcccggaggagcccaggctgggatttggaaagaagaaggaggagaacaaagcccccccaaccttggggcggaggggcaggcagcgcccagtcccgttcactcccctccccccattgcaggggcggcttatcccgatctacccctcaccacgctgtcagccgggattttcaaccaaactgagctctcggctggggatgaggggcagccacgcccagggccacaccccacggcggcctgtgggggagcgctcgacccgatctggcttcctttctcagacacgcacacacgcacggggacccgccaacttcagcccccgcctgcccacacagaccctgcctgacgccccccgccctgttctcccgcccaggccagcatctggggccccgcagggtacccctcacctgtagggctcgggcacccggcatccctcccccgccccgcttacagcccgcggtgcccggagcccgacgcccggcatgggtggggctccggcagcaacgccggttaccgcgggccggaccgggccgggcggactccctggtccgtgcaccccgggcagagcggggtggggtcgccgggggatcgcggccgcggcccgggtcgcacggggaggccagcccgccttacctgcgctgcggacaccgctcgggctgcccgcccagcctccgcgcacgccggcctcggacccgccgcccgagcgcgtctgcgatgccgatgctgcggcagcagcggctgtggcggggcggggcgggcgtgcgcgcaggggcgggggaggggagcgccggggaggagagggagggaggagtgagatcacctccccggccgcccgccccgccccgccccgccccgccgcaccctagcccctggtgccagccgagcgcggcttgggctgggggcccccgggcagcccactccgggagctcagcgggaccccagccgacgggtcccgccagacccccttccccgcagaccgggagtctccggccggagagtgtcctcagccccagcgcaagggagcccgctgtgaaagctcggagcgggaatcgcggggcgagagtgctcccagaggcctggggccgggcggtggagagaggagtccggcaaggaaggggatgctcccttagcctcggcctggccctcgacggcgccggccagcgatgggcacctgcacgcaacgcccccccaacacacacacacagggcaggactcccgggacctctcccgaatgccccccgatcctgagggcccagtcagggtcctgttgggaggggtgcgggggcttcgtcctcagcgtgttggggaggcgccgcggagcaccggctcctgcgcaccccagagcccaggtgggcggcagggtaggaggcgagcccaggggagacagggtctgggagagggtatccctcgaactgccacccccaactcccagattttcctccagctctctggtgtcttatttctttgtcctcgggattggccccattcgacctttcccgccgactccactctctcccactctcccccgcagccctgcacaggatcgagaaggaaggagctcctccccagtgccccctcctaggctcaaggccatgacctcacaggcgaggaagcaaaatggagggggtaagaattccggagccggcgagctggctgcagcctcagggctaggaaggcctagggccccgatggcagattgcagatctggcggccacggtatttttatgggcatgcctgttgcccagtgaagcattccaggggccctcgactcagtctcacaagactccccaagtggtgtggggccctggagggcccacatgggagcagccctggcatcctggcttggatgccccacccccatagtgccagcttcagttcccctggaatgggaagcttggggtggacccatctgtgctcagagagggtctggatgccatgtttgcccagcctttaggaggagaatggacaagactaggcacctgagtgaagacggacggctagggagactgcttccagagtgggggcacttgcagggcatcttcaggtgacagcagaggaaactgagcccgcctgggtcacgaggccagcaggctcatgagctgggccaagagggcgtactttccatgaggcactgagctgtggtcagcttcctgcctttgctgatctgaactctgataggcctctctcctttccagttgctgcctccactcactccctacgttcccagcctttcctccaagccccaacttctgcaaatcctttacctaatctagggtttgatgcccatcaggatggtgaagtaagcagggaatagagcccgtttatacgcacctgctaatgtgtagtgatgggtccatttatggtaacaaaaaattcattactaggattacacgacatcacatttcctgagcacagccatggacctgccatcgttacatttcctgcacatttaaattgcacaccaacctggggaggtctgttgaagcattcgccccacgttacagatgagaaaaccaaagcccacagagctcaaggctgggtccagcaagcacagttaggaaggtctctttctctccactggctcattgcatccacacacacaccccagatgatggtgctgttattatcctcactctcccagtgaggtacccaaggtccagagaggggcagtcatgcaaccaggaagaaattggcactatcagtgcccccatttcacagatgaggaaaccaaggttcagaggggtcaaatgacccacccaagatagcccagaaggtaaatggcagaactcggacttgaattcccttctgcttgaccacgatgcccattctcacttccatgtaatgaagtggaggagccaatgggagcaagagcaagagtgacagaagaccaagggcagagcaagtcccaggagaagcaggagggactggccctgaacaagaggcaagccacccccccactgccatgtgcttgctgttggaggttagggggacaccaagtagacagatgactgtctctttcccttcaacgtcaagtgcttctcacagccctgctccctgtgacccagccctcatagacacagtggactggacaagggaagccccagactctgaccctgtgatgagcatgcagaagacgcagaagccacagacgacagtggggcagtaaggaagtgccagcaggcaggcggggtgggctcagccagacgtgtctttctctgttctcctttcaatctttctgtgtcttcatatctcaggtgtagcgcttggaaacagcacatagttgggttttggtttggtttgattctgtctaacaattcttgtctttttaaaaatcagctttgagacctgcctgggcaacacagcgagaccacgtctctacaaaaaaaattttaaaattaggcatggtggtgcatgtctgtagtcccaactactcaggaggctgaggtgggaggatcgctggagcccaagaggttgaggctacagtgagccatgatcacaccactacactccagcctgggtgacagagtgagaccctgtctcaaaaaaaaaaaaaaaaaaatcaactttattggagtataatttacatacagtaaaattcatccttttgaggtttacagttcaaggagttttggtgaatgttgtgtgcagccaaccactcccaccaccccctgcccttggccaccactgatctgatttctgtcttttctaaattttattataaatggaatcataccgtatatattcttttgtctggcttctttcacactcacgcagcatactttttgagcttcatccatgttggtgtgtgtgtttgtgtgtgtgtgtgagagagagagagagagagcatgcgggcgagagagagcagtatatttccttttgattgccgagtagtattccattgtttggttggatcagggtttgttcagccattcactcactgaaggacacttgggtagtttccagctttgtgtgattatgatggagcagctctaaacatttatatgcaagcttgtgtaaatgtgtgtcttcatttctctaaggtaaccgcttaggagtggattgttcagtcaagtggtagattgatgttgaacctgcctttgtctttgaactgtgcaggtcagctggtcacacggtgatgactgctgctatctctggatgtagtcacgccaggtgagtatttgctttctatttgtcctgctttccccatctctctcccccacctccactttattattttttattagtgttgttattactttgagacagggtctcactctgttccctaggctggagtgcagtggtgtgatcatggctcactgcaacctcgacctcctgggctcaagtgatcctcccaccacagcctcccaagtactgggacaacagatgtgccaccaccacacttgattaatttttttttcttttttggtagaggtgaggtctcactatgttgtccagactggtcttgaactcctgggctcaagtggtgatccactgccttggcctcacaaagtgctaggattacaggagtgagtcactgcacctggcctcacccccacattgtatcagtgaaggtgtgtctggagttggttccttccagtgggttcttggtctcgctgacttcaagaatgaagccgcggaccttcgcggtgagtgttacagctcttaaaggtggcacagacccaaagtgtgagcagcagcaagatgtattgtgaagagtgaaagaacaaagcttccacagcatggaagaggacccaagcaggttgccgttgcttgtggggggcgggggggggccagcttttattcccttatttgtcccctcccatgtcctgctgattagtccattttacagagtgctgattggtccattttacagagtgctgattggtccatttacaatcctctagctagacacagaaaactggtgcgtttttacagactgctgattggtgcatttacaatcctttagctagacacagagcgctgattggtgtgtttacaatcctctagctagacagaaaagttctccaagtccccacatcacccaggaagtctagctggcttcacctctcaaaggttcagggtaggaagcagaaattcctcccgtgatcatgaacagaaagggattctgtagaagggattagatgcttacctgaccattggatgggccaaaggagtggactctgggctaggtgttgataacaccagtgcagacctggctcctcaagggagctgctacctctgccaccatccacaagatgggggattgggaggcggccagtgtaacctttgagttcaaaaagacaccaccaaagtcatgacctgaggatcagcaagctgggaccaggaagccattgctgccacaagtgcccctcaacaaccaagaagtgaaggttagaccccagaaattctttgatgtccagcagaaacgcagccccacacagcagaagtgtggcttcccttccttcagtcatccaaacttcatgtgagcacacccaatttggcaattggcaaatttgccaatttgccaattggcaaaactaaatttgcttcccaaagtccagctgctctggagtctggaacatttccagcctctgccatgcagagcccacaaggtgggagtgagtgccgagagctgtcaatatgcccaggcagatgctctgctcttggtcatcttttagatggactggatttgttctctcattctattttctcctctgtttgtttagaagtgctctatgaattttttagtagttcctctacctattttaacatgcattcttaataaagtctaaagttaactaatacctctgctctggtggttttaatgtaggtccataaattatttgatactcctgccttcaaaaggtagtgcttaattctcctcctcttgagtataggctggacttggtggctcacttttttttttttttttttgagatggagtttcgctcctgttgcccaggctggagtgcaatggtgtgatcccagcttgctgcaacctccacctcctgggttcaagcaattctcctgcctcagcctcccaagtagctgggattgcaggcgtgggccaccacgcccaactaatttttgtatttttagtagagatggggtttcaccatgttggtcagtctggtctcgaactcctgacctcaagtgatccacctacctcggcctcccaaagtgctgggattacaggtgtgtgagccaccacttttttttttttttttttgagatggagtttcactctgttgcccaggctggcatgcagtggcgtgatctcggctcactgcaacctccacctcctgggttcaagcgattctcctgcctcagccccccaagtagctgagattacaagcccccaccagcacgcccagctaatttttgtatttttagtagatacgaggtttcatcacgttggccaggctggtctcgaactcctgacctcaggtgatccgcccgcctcagcctcacaaagtgctggaatttcaggcttgagccactgtgcccggcctcatttcttttttaaattttattttagaagttgaggtcctgctctgtcactcaggctggagtgctgtggcatgttcatagctcattgcggcctcgaacttctgggctcaagtgatcctcccgcctcagcctcctcaggagctgggaccacaggcacacaccaccacacctggctcacttctgatgaaaagaataaagcggaagcaatggctgcagctgtggggactaggtcacacaggcactgctgcttcctccttgttttctctctctctctctctctctctctctctcggattgctctgttgggtgaagccaggtgccacatcgtgaggacactcaacagccctatggaggagctcacatggagagaaacaaaggtcttccgccaacaaccatgagtgtgccattttgaaaaggatcctccagccccagccaagcctttgcatgactgcagtcatggccagaatcccactgcagcctcacaagagcctttgagctagaacaatccagctaagccactcctgaatcctgacccacagagattatgagataataaatggttactgtcattttgaactactgcatttgggggtgatttggtttgcagccacagatcactaatacatcttccctcctcctacacaatgcacggcctgggataacatactagccacatgaggtgggccctattatcatgtaggaatgaggaaggcagtgagctcagatatgtggacaggaacccaggcagagtcagccgtctgagctttgggaagcctggttttcagtagctctagggacttacccacacccccacactcccacccctgaactgctattatggtgctgtagcccccacggtgcctgtcactacccaccagctgctgtcccctctcctctgtgtccatcttttcttcatgtctttgcttctcctggcattctcctgctttgtgacaaatacccgtggctttttctgcacatgtcttttggcttctaatctcactgcagtttcaattccaagagagagaaacttatgggcccaaatactcattatcctcattttggtggagccttcatgccaggtaacttcgtaggcaactaaccagcctatggactagctagtcttggccaggtgcgggctcctggtccaggcagctgaggccaaggttggttcaagctgtgtgataggcagtatggccatctgttatggacttaatgtgtgtgtacccccaaaattcgcacgttgaagtcctaacccccagatggagcagataaagaagaacagagaggctggacatgatggctcatgcctataatcccagcactttgggagaccaaggtgggcagatcacctgagtccaggagtttgagactagcctgggccacatggtgaaaccccatctctacaaaaaatacaaaaaattagccaggcatagtgacacacgcctgtagtccgttactcgggaggctgaggtgggagaatcacttgagccttggtggggaggctgtagtgagccgagattgcaccactgcactccaacctgggtgacagagtaagaccctgcctcaaaagaaaagaaagaaagagagagaaggaaagaagaaagaaagaaagaaagaaagaaagaaagaaagaaagaaagagaaagaaggaaagaaagaaagagaaagaaagaaagaaagaaagagaaagaaaagaaagagagaaagaaaaagaacacaagaaaagcactgttccctcccctccaccactgcccctaccatgtgaggacacagtgagaaggtggctgtctctaaaccaggaagacagccctcaccagaagtggaccctgccagaccttgatctgggacttccaacctccagaattgtgagaagataaatttccattgtttaagccacccagtctgtggtattttgtgatggcagctggagctgactaagacaccaccaatgggtaagtcactggctagtggtgctgctgcagcagggagtatgtcttggtgggcatcttgctcgacctctcctatctaaccacactgaagtcatgcattcccttgtttttctttatactaggcccacgaaaccccatgctttgaaaagaattgcttgtttgccttcaccactcctcctcacagcctggaggtgatcatgttactgtgtagactggtatccctagggacttatgggctccaaacaagctgcccatgaatatcacaatcctgtcacatgcccttagccagccctgcttcccttccacgcagtgcaccggctgggtgcagtggctgatgcctgtaatcccagcaccttgggagaccaaggcgggcgggtcacttgaggtcaggagttcgagaccagcctgtccaacaaggtgaaaccctgtctctactaaaagtttaaaaaaaaaaaaattagccgggcatgatggggcacctgtaatcccagctactcgggagactgaggcaggaaaaccagttgaacccaggaggcggaggttgcagtgagccgagatcatgccactacactgcatcctgggcaacagagcaagactccatcagaaagaaagaaagaaaagaaagaaaaggaaggaaggaagaaaggagaaagtgacagattaagcacatacattcactttctcttcctcatgaaatcccaccaaaatgacagtaaatgactttttaaaaagaaaaactcccaaggacagaaataatgggaaaatagaaaacagcagcaaaatcatgggagctgaatttcactgcggaacccacacgcatccagaaaatgggggtgagtatggaagtgccattaaaagtctgttgaagaggcagtcagatctccacatgcttttccccatcccaacggaacagaatgtttattctttggagatgatgaaacaaagagtgtttcaagtggggagtaccaggaacagcttagatggcaccatactaaaaatgagggggttaaataaatatttacctactgaatttggaccactttggaccctcctggcccactctgtttctcaagtgctgacaaccagcctcaggcagcaggctaaagatctatctctgggtatttggccatcccaaggtgaacgaaaaggtagtaaaattggggttctccaataaaaccagccccgctacatcatcctatgatgaagctcatagttgacatgtccttccttttcaatcagctcattagtgccccattctttttttttttttttttttgagacagagtttcgctcttgttgcccaggctggagtgcagtggcacaatctcggctcactgcaatctccacctcccggattcaagcgattctcctgcctcaggctcccaagtagctgggactacaggtgcgtaccaccatgcccagctaatttttgtatttttagtacaaacagggtttcaccatgttggccaggatggacttgatctcttgacctcaggtgatccgcccacttcggcctcccaaagtgttgggattacaggcatgagctgccatgcccagcctgccccattcttaaatatgagaagacaaccaaggatcaccagacacctgaggaaaacctttagcatgaaagcaggaaagatcaaaatcaaaacaaacaggaaaacaattgttgggaaacacgactatgagaggtaataatttttaaaactaggctgggcacggtggctcacgcctgtaatcccagcattttgggaggccgaggggggcagatcacaaggccaggagtttgagaccagcctgaccaacatggtgaaaccccgtctctaccaaaaaatacaaaaattagctgggcgtggtggcgcatgcctgtaatccaagctactcagaaagccgaggcaggagaattgcttgaacccaggaggcggggcttgcggtgagctgagattgtgccatggcactccagcctgggcgacagagcgagaatctgtctcataaaaaaatttttttaaaaagaatttttaaagctattaactcactcagggagataatagaatgtaaaaatatccatgaatcaagaataggatgctataaaaaaggaacattcagcgaacaaacaagagttttttgtggaagcatacatgaaaaattcaatagatggatatttttcttctaacaaaatacagaaagttgcaagacaacatcactcccatcctagctacaagaagctggataacctacaaatcataggattttttttcttttaaggctatcgggaagctgaggttggggggaaaaaaaatcaaaatcttgaaaagccctttctaggagaaaagagccccatagctgctttgatttttggcacagcagcagcaggaagaggaggctgccacagacttgtgtacaaaagaaacagagaaactctgaacacattttaaaaggctgagtgtgcgacggcatgaggctatagactctctaatgcctcccattcaagagagcttacattcacccactaactcttttgcatgggccttcaccaagaaagtttgaaggcaaagcaggtgggccgaaagatactctccgaggtagacatgtgctcaggctgctgaagtctggatgcaggacaagggaaccgacaggaacccccctggggctcctgaccttccactgagtacagagcagctgtaactggtgaatgaagcagggcaggaggactgaagagttcatccccaggctctaggaagtcttaaggcaggacagaagaactgaaacaaaccttccggttgattctaatccttacactgagtacaaaccagaagcgaactgtggttggagtggaggcaaaagacctacaataggcacccgggaatgtgcgctcagggatctgctgaagtctacgggtgaggcaggagaatcaaagaaactcccagccactcagatcacaagtcccaccaaagagaatgttctgatcctgctctgaaatcattcgaagtatacagaaaactgagtctacgcaaagcaacaagaaaccccagactccacttaactacacaccagcctctaatacacacacacgcatgcacacactaatggcctgacaagaagggtcatgccctttttggggcataattttatgtgtatcttccccactgttctattacatatatttaccccaggagggataaatatatatgattatttacttcttaaaatagaaataggccaggtgtggtggctcacacctgtaatcccagtactttgggaggctgaagtgggaggattgcttgagcccaggagtttgagaacagcctgggcaacatggaaagaccctgtctctataaaaatacaacaattagctgggtatggtggtacatgtctatagtcccagctactcaggaggctgagatgggaggatcccttgagcccgggaggtcgaggctgcagtgagccgtgatcatgccactgcactccagcctggctgacagagtgagaccctgccttaaaaaaaaaaaaaaaaaggaatttgggaagggctcacctgggcagtcctggcccaggtctttcatgtggtggctgtcagatggtggccctcttcatattgcctcagagccttttttttttttttttttttgagaaggtgtctcactttgttgcccaggctggagtgcagtggcggggtctcagctcactgcaacctccgcctcccgggttcaagccattctcctgcctcagcctcccgagtagctgggattacaggcgcacgccagcacacccagctaatttttgtgtttttcagtagagacagggtttcaccatgttggtcaggctggtctctatctcctgacctcttgatccacccacctcagcctcccaaagtgttgggattacacgtgtgagttactgtgcctggcctcagagccattttctgtggtccttccatgatggctgaattgggcttccttatagcatcagggaagttggaatgcttacatggtggctaaaggcttgaagagtgagtgtccctgttaacaaggcagaagctgcattaccttttctgcactagcctcagaaatcaatcagcaccacttttaccatattatcttgagtacaagaaagtcacaagcctgcccagattataggggggagggttaaattccacctcttgatggggaagtggcaaggttccaggagagcatgtgggatgggagatattgttggggctacctttgaaaaacacaatctgccacacacaccagttaaaaggcagagactgttgggctagataaaatagctatatgttatttacaagaagcacatttgaagcataaagacacagacatgttgagagtagaagtatggaaaaagatataccaagcaaccactgagcataagaaagctgccatggcatcatactaatatcaggtagagcagaattcaagacaaagagtttactagagatcaagagagacatgtcataatgaaaaaagaacacataatcaagaaaacacaaccatttcaaatatataagcacctaatctaccaaatatatgaaacaaaatttataggactaaagggttctagatacagataaatctccaaacatactggccaactttaacattcctttctcagtaaatgataaaacaaataggaaaaaaatcagaagaatatagatttgaacaacactatcaacctaattgactcaattgatatgtacggaacactacatccaacaacagcagaacacatattcttctcaagtgcagatggaaccccaaccaacacagacaacttctgggcaatcgagcaagcctcaataaattacaaagggtcaaaatcatacaaagtacgatttctgaccaaaatgatgttgaattagaaatcaacaacaaaaagacatctaggaattttctaaatattttgaaatgaaaaaatatctacttccaaataacccaagaaccaaagaagaaaccacaagtaaaattattggtagaacatatctttcactgaatagaaatgcaaataaaatatgaaaatttgggaattcaacaaaacaactgattagaggaaaaggaactacttatattagaaaagcagaaaggtcccaaaataattatttaaatttctactttaagaaactagagccggtcacggtggctcacacctgtaatcccagcactttgggaggccgaggcaggcagatcatgaggtcaagagatcgagatgatcctgaccaacatggtgaaaccccatctctactaaaaaatacaaaaattagctgggcgtggtggtgtgcacctgtaatcccagctactcaggaggctgaggcagaagaattgcttgaatctgggaggcagaagttgcagtgagccaagatcacaccactgcactccagcctgggcaacaagagcaaaacttcgtttcaaaacaaaacaaaacaaaaagatcaatgaaattgataagcctctagccagactgatcagaaaaaaaaaatggagagaagatacaaattaccaatatggagaataagagagagggggcattattacagatcctacaaacataaaaaagtgataagaggatgttgtgaaaaacttattccaatacatccaacaacttagatgaaatggacaaattccttgaaagatacaaatggtcaacgctcatttaggaaaaaatagataacctgattagccctgtatctgtcagaagagttgaatttataactgaaaaaattctcacaaagaaaactccaggtttgtgtaaataataccaattctatactaactcttccagaaaacagaaaaagagagaacacttcccaactcgttttataaagtcagcattatactcatccccaaaccaaagatattacagaaagggaaaacgtagaccagcatctctcattaatacagatgtaaaaatggtaaacaacagccaggcacagtggctcacacctgtcatcccagcactttgggaggccaaggtgggtggatcagaggtcaagagatcgagaccatcctggttaacatgatgaaaccctgtctctactaaaaacacaaaaattggccgggtgtggtggctcatgcctgtaatcccagcactttgggaggccgaggcaggtggatcacctgaggtcgggaattcgagaccagcctgaccaacatgaagaaaccccgtctctactaaaagtacaaaattagctgggcatggtggcgcttgcctgtaatcccagctacttgggaggctgaggcaagagaatctcttgaacctgggaggcgaaggttgcagtgagccaagatctcgccattgcactgcagcctgggcaacaagagtgaaactccgactcaaaaaaaaaaagaaaaaaaagaaaaaaattcaatactcacttgtgataaaagctttcagtataccgggtgacagagtgagagactatgcctcctccccaccaaaaaaaatataaaaaaaaaaaagaagttacacaaaatactatgtactcttttatttatttatttatttttattattatttttttttgagacggagtcttgctgtgtcacccaggctggagtgcaatggcaagatctcggctcactgaaacctccgcctcccgggttcaagcgattctccagcctcagcctctgagtagctgggattacaggcttgcgccaccacgcccggctaatttttgaaaatactacatactctatgattctatttatataaaattctagaaaaggaaaatctatagtgatagatcagtggttgctaggctttcaggtaggggaagaagcttgactgcaaaaggccacgagggaactttctggaatgtcgaaaatatttattctatgtcatgattgtggttgtggttacacgactgtatacatttgtcaaatcttactgaacagtacaattacaattaatgaattttactgtatgctaatcatacctcaataaagccgaaaaaaaaaaaagtcattctggaggagagaaatcattgcctgcggagggccattccagggtggtgagtgcatgagcactgaagacacccggagcagctgctgcaataatctgggggaggaacgtgcaggcagagagagcaagaggaagtcagactgggaaaccccgaggcagttacccaaacagcccactaacagcaactgcagtcggccgcctctggggaggaaagcgggaggggccactgcctttaaaaaagaaaaaaaaaaaaaatctctgcagttttgccagggagccgcctcctgcctgactctcacatgatgacctggaggccatctatgggtacggccctcaagccctcaacgctcaccctccttctaccccccgcccctcaccccagcacctgctggagaccctggccctcccttccactccgcgaggctcttaatctatccagttccatgggctgcctttccgcagctataaacaggctctgtccagctttcccagttattattcacttaggtgaatggacacaattagatgatcatccgcaggctgtcttcctgtcatcattggcacacgcacacaccctcacacacgcacacaccctcacacacgcacacaccctcacacacgcgcacaccctcacacacaacccccccaacgccacacacacacacaccacacaccctcacacacaaccacccacgccacacacacaccacacaccctcacatgcacaccctcacacaccacacaccacacacaccccacacacacgcccaccctcacatacgcacactctcacacacaccctcacacactctcacaccctcacacacgcacaccctcacacacaccctcacattcacacaagtacacttgagtttttattaaatttgtttttgtccccttcaatcccatcctccaacccgttgttcctccctatctcctgggctctaggtattctccttcgggtcacagtccctgtgagggccgttcctgttgacaggcacttggctccgtccttcccactgcccacaggctccaccatctgcacatgcacccctcccacacaatcgggggcctctttctcctcgtccttggctgcctcctctttgtcttccaccccttacaaatccttcagggccctttaaatgccttttccacctgcctgctccctctagccccgctgcccagtgttaagtgggtcgcaccatttctctcctgggtgacaggcacagcttccaccagcctccctgcctccactcttctctgcagaagcccatgtgctcctggggcagagcccaggtccttccatctctgcagccacagtgctaggccagcggcacttgcagtttggtgaatggaaggttctgatcatggggaaccggtagatagagagggacaaacagtgtccccccaatctgcctcctgtcctcttctgcccagacactaggctggaagatcaggagccacaccttggcactcacagagccctttctgcaagtcttagagggaccagtgggaggtgtgcacacaggggctgcgctggcaggagtgggggcctggcacacccccaggtagatgccctgcccgttaacgcccaagggcaggggcttgagtgactcatgtgggcctagcgtgaatcagcacagtctgcccttcttcccatgggagctgctgcccagccccatctttcttggcccccgaggggtggctgcccagggcctctctcctggcacagttccatgtagtgcctgcccatgtggctcccagttcctccccggggtcctggctgagcagaatggcactggatcctgatctggcttcttgcatcccagaggagaccgccatgcgggcccttcctccagattcttccctagtttaacaacaggaagcgaggagtccaggggggcagagattgccacgggcctggccacattgctaggggaggtcccaacctgctgctgagatccggcactgcacagcctcgttcaggcagagaaactgataaggagatggttgtctgctcaccccaaaaggttagcatggattcctcgccctagccggctttagacggagggaacaaaggctttcccaaggccctgccagtccccacccctgcccatcttaccaccgtagtctccctcaatcatcaagtcccattgcacagaaggggaagctgaggtgccaagagctggcgtggcctgttcaaggtcacactactgggcaggggccaagcaggggctggagccttgctttcctattccccagccagggtccccaaattctctgccagttgagggaagccatctcctattccactgatctgggtggcattaggaaggccttttctatgctcctagattagtgacagcatgcggttattggggacagcatgaggatgtgcatgcgctgaggagatgcagctgaagcgtcaggcctggggtgccagcactctgcagcctgcccccaaggggctctgcaaaaacatggcaaagatgcggggtgtgatgtgcacctgtgtgtgctgcgggtgtgtgcgtgtgtggtgttggctgtgcgtatgtggtgtgtatggctgtgtggtgggtacatgtgtgggtgtgtggcgtatgggagtgtgtgatgtgtgcatgtgtgtggtgtgtaatatatgtgtgcatggtgtggtgtgtgtgtggtgtggcgtatgggtgtgtggtgggtgcatgtgtgtgtggcgtgtggctgtgtgcatgtatgtatgtggtgtggtgtgtgcgctgtctctggaaaatgcccaccctgtgttcccaccaccctaacagggccgggaggggccagggtgctgccaggctctctgggcaggaagaggaggccttggccgcgggccggacttgggcctggtccgtgaggctgttttggtctctggcttcacaggcaacagagaagacagacaaacaggaagaaagcagctgccttgggctgggctgggctgggctggcctcggctgagccaagccaggcctgggtgcggggggagtggaaagagaactactgggatgggggctggagggggtgtggggacaggggaaggagagaggtgttgggggagggaggaggagggctcaggtacagggaaggtgcgtccatactcatggtatgttcaagaacatgagcgagcgtctctgtgttgtgtgtttgtggctgtgtggctgtatcatgtgaggttgtgtgtggtgggagggagcccgtgagcacacggaggtccccagcccctcttcctaggacaggtagttgcaggtggggcaggaggaagagggtgggggtgtccctggatctcacaggggttcgtgaagcctggcttggcccctgccccactcctccctttcctgtccctcgtctccggccaactgggccctaactggggaggaggaggggcctgcgtgggcctgggaggggcccagcgaaagtgttttcaccccttccttgcctgggcccagcgaggagcaggaggaccccaacttgggaagggggcgtgaagctcccatgaaaaagcagcgcagtcctgggccagacccaccgctctctggcctcagtttccccacttataaaatgggaatgctgaactaagtgacctcccagagcactgccaacccagacaatccaaccaggggggcgtggtagggtgagggtgggcgtggaggctatggcagtgggaggagggagtcctgggccgggaccagggaggccctggggaaaggaagggaaacaggaggccaggggaggcctgggggaaagggggagggggaggaagtcccctcctggccaggtcactcccagaggctgggctgggccagggcagggcagccgatggagagcagatctgagcacccagccaccttcacgccaccgcccagctgcccaggagcccagccaggtaaggggctgcgcctgcctgcccccctgcccagtccccagccctcggatggtggcctctctcggcctcggttggggcaggggagttctgcgtgtctgtctggggtgcccactcccaaacccgggactcatgggctgcctgggggatcctgggttctgtgcatccgtctgtctgaccatccctctcaatcttccctgcccaggactggccatactgccaccgacacgtgcacacacgccaacaggcatctgccatgctggcatctctataagggctccagtccagagaccctgggccattgaacttgctcctcaggcagaggctgagtccgcacatcacctccaggccctcagaacacctgccccagccccaccatgctcatggcgtccaccacttccggtaaggcttgcccctccatgagtccggtgggcagagtgggtttgacgattcagggaagcccctctttctaaagacctccttcaccctcacctctgggtgtgtctctccaggctgccaatgagtggggaggggagcacagccccacttccccgccagggctggggctggggctggggctggggctgcccttccttctggactgcatgagcctggggtgtgtatccctcataacatggctttcctggagtcccctctgctaggagccaggaagtgggtgtccggatgggggcacgggaggcaggcctgagtccccctgcacagcaccctctctaaccaggccctcttcccgactccttcccagctgtgcctgggcatccctctctgcccagcctgcccagcaacagcagccaggagaggccactggacacccgggacccgctgctagcccgggcggagctggcgctgctctccatagtctttgtggctgtggccctgagcaatggcctggtgctggcggccctagctcggcggggccggcggggccactgggcacccatacacgtcttcattggccacttgtgcctggccgacctggccgtggctctgttccaagtgctgccccagctggcctggaaggccaccgaccgcttccgtgggccagatgccctgtgtcgggccgtgaagtatctgcagatggtgggcatgtatgcctcctcctacatgatcctggccatgacgctggaccgccaccgtgccatctgccgtcccatgctggcgtaccgccatggaagtggggctcactggaaccggccggtgctagtggcttgggccttctcgctccttctcagcctgccccagctcttcatcttcgcccagcgcaacgtggaaggtggcagcggggtcactgactgctgggcctgctttgcggagccctggggccgtcgcacctatgtcacctggattgccctgatggtgttcgtggcacctaccctgggtatcgccgcctgccaggtgctcatcttccgggagattcatgccagtctggtgccagggccatcagagaggcctggggggcgccgcaggggacgccggacaggcagccccggtgagggagcccacgtgtcagcagctgtggccaagactgtgaggatgacgctagtgattgtggtcgtctatgtgctgtgctgggcacccttcttcctggtgcagctgtgggccgcgtgggacccggaggcacctctggaaggtgggtgtagccgtggctagggctgacggggccacttgggcttggccgcatgcccctgtgccccaccagccatcctgaacccaacctagatcctccacctccacaggggcgccctttgtgctactcatgttgctggccagcctcaacagctgcaccaacccctggatctatgcatctttcagcagcagcgtgtcctcagagctgcgaagcttgctctgctgtgcccggggacgcaccccacccagcctgggtccccaagatgagtcctgcaccaccgccagctcctccctggccaaggacacttcatcgtgaggagctgttgggtgtcttgcctctagaggctttgagaagctcagctgccttcctggggctggtcctgggagccactgggagggggacccgtggagaattggccagagcctgtggccccgaggctgggacactgtgtggccctggacaagccacagcccctgcctgggtctccacatccccagctgtatgaggagagcttcaggccccaggactgtgggggcccctcaggtcagctcactgagctgggtgtaggaggggctgcagcagaggcctgaggagtggcaggaaagagggagcaggtgcccccaggtgagacagcggtcccaggggcctgaaaaggaaggaccaggctggggccaggggaccttcctgtctccgcctttctaatccctccctcctcattctctccctaataaaaattggagctcattttccacatggcaaggggtctccttggatccgggtaacggtgggtgtggaggcagcacagagacatacacagactccccacacacacccacagtcacgtgcacagctctggaatccatggcgcaggcagccaagtcttcaaagctgcaggacccctggggaagctgttctcacctccagcacccacctgcccacccgagacagagagctggctcccatcggggaatcaacacgaggtctttatgaatcgccacccagccctgccaggcatctgagcaagggtacccgccacccagcagccactgatcagccttccacaaagctgcagaagagggctttccccagcatccttcctcagctgcctccaaaaggggcctgggccagggctgaggggcaggcaggatgtggagcgggcatccctgtgtgcacggccccatcccacctctctgcacagggtgaagtgcaggcaccctgcacttgctggacagggctggagagaagcaagggggctggggagagtggccggtccagcgggtagccgccgggggcacgcatctccagcagcggcacctcagtgtggcttgggggtcgtgtctaggccctgggggtgggaagctgagggtgaggctggggccccagggccccgggagaagcctttgttcctgcccaggcggctgctgggcggggcctttgggcttcggggcccaggactgggagaggtggtagatgctggcccaaggccctggcggacagaggtctttcccaagagctccttaaacacagagtccatgttctgtgccacagcctagcggaggggaaagaaagggagagtgaccagtgagttcccccgactgaccctgcccaagacccacctgagttcctcccactcccaaagcaagccctcagccaacatccccagtccctcagcctccaggtcactctcccccactttgcacctggcatccctcctgtccctgttggtgtctctgtcacagtctcctctgaggacagcaattccttggtttagcccggaagtggggacccccctcttctcgcccccactctttccctggcagagatcacagccccctgcccatggcctcagggaccgccagcgtgcggggactccccagtcaatgtcctcccatggcgtctcctggctgccctgtccctggctcccgctcctgctcctccgtgtctaccggaccctccctgggctccctgggcctgggggcttggccacacctgggacacccgcatgttcttgggctctctcctccttgggcttagcaactgtcccgcgggcttccacgttcagcccgacagtgttcacagggcccatggtacagagcacggagcagggtcccccaggttgtgcgcttgccagggccacatcttgagccttcgctctgctccttcgagagccgctgctgccccaccccaatccccaaccagccaccccctcctgcctccctgccatctgtccctttcatcctccctggcgtgccaagcgcctgccatggcaccgcctgttacctagcccagctacaaatgccagccttgaatctgccctggagtcccttgcctctaccaggtaaacagccttaactcagccctgccactccctgctctgaagctgaacatgaatcccaacgtgcaagccaggtgtcttctgtccctctcatccctgcctccgtagccgtccctctccatccccacccgccctcacatctttgccttcctgccctccacaggctctgccttgggcctgtgtgtctggcggcaggttcccttgagctaaggccagggagggcaacgactggaacctcgaggagggaggagtttggcttccaaggggaggcagagatcccccaggacagatgtccctcacctgccacacacccactctcaccttatccacctccacgtgttgctctggggaggctgggaccaagcagcgtcgtctgtgtccagagggtcccatggcctcaggtgaggtgcatggctctggcctgcaggacagacagggagcctggtgggggccctgggaagtccctgagctagctgggcagtggctcctcccatcctggggtgtggccaaggaaaggaggctggcccagtggtccccaagctcctctagagcctctccctgtcacaagctgggtcattctgtcacgtcctcatctgccaactcctcccactcccactggccaaagcctgaccccagtcccctctggcctagaacagcacacgtgtggccccctgagccccgtcttcttgctcaccggtggaccagctccgatgccaggaggccctcgggactgctcccagactcccctgcagtctgcagccctgcgcccaccacctgcttctccgtcctgcggtgggaaggaccggcctgtttcgagtgctccttccctgcacggggtccagggccagcagcctccgcgccagccaggagtggtcagagaggctctgttctctggcccagcccagaccttcagaatctaacttggggtcgggggaggggtggatgaaggggagactccgggagccctggggcctgagggcgcggctcactcacccggcgggcagcgtgatatacttgtgggggatgaggccccgcatgccgttgtgctccccccgccaccagtcgctcgaggccctctcgtgcagccgcagtacgtccccccgccggaagctcagctcctgggctgtgcggcccgtgtaggcaaagcaggccacagcctccacgaccccctccaggtctggggaggagagggggtccaagctgtgggagggggtgtggacactagggtggggacagggtggggctctctgcccatcgccctcaccatcctcctgtgcgggcatctcggcttccagctccggctcattgtccgcccccaggctctccagctgggcgtccctgaggttcagggcagagcgaggcagatgaggggggctcttctccagtggaccccccagtcccctcggcagcaccaagggtgtaccccaggcagctggcggaaggcggtgccatgcacttctcgtagacggggccaggcagcgaggtcaggggcgggaagacccgatcgggctgcactatgagcgtctgcaccagctggttcacccggccctgcagcgccaccgggtcctgcccagcgggcaccggtagcagcgtgggcccgaagcacacggccaggttgtaggggtccatcatgttctcatcgctgtactgggccaggctggggggacacgcacatcacaagcagagagcccgcaccccgagtccccctgtcccctcgacccctggcccccaccccagcactcgccccgcagcactcactggttgaggaaggtgaagaggtagcgcagaaccaccagcaccggcgcgggcagccgccacagcaggcggctcacgtgctccaccctctccgctgtggcctccagctctgtggccaaagccgcccagagagagccgcgtgagcggggctgccccagcaagtgccctaccccgccagcctcaggccccagcctcacccgaagaagccagcagctcgccgaacaggtctggggggaagagtgggggctccaggctccggaagtagagcttcagcaccccggccaccgagtccaggtcatgggcagtgcagccctccaccagtgggtcctcccctgcagatgggcgagtggtgcggtagggggaggaagctggtgacatctgcccgagcccccacccccgcccgccctgcccgtccccacctctctcgaaggcatcacggatctctgagacccggagctgggcacccgatacccggaagatgccttcatgctgcaggcctgtgggaggacaaggagctggtgggcactgagcatcttccccagcccctccaggatggcctcccatgccaggtgctgggaactgggtgctgggtgccaggacatcgggaggggctgggtcctgcttaccattgaggttgatgaagcgaatgcagctctccaccaccaggggcacaggctggcctgagctctggggacagagggtgtttacttcaccatggacacagcatgccctgtgttgtcattcaattgctttttttttttttttttttttttgagacaaggtctcactctgtcacccaggctgaagtgcactggcgtgatctcggctcactgtagcctcagcttcctgggctcaagtgatactcctgcctcaagctccccaatggtgggattacaggcatgagccaccgcaccaggctgagtgcttttattttctctgaagaacacatcatcgttgtcggcacagaggcttagcacaccgtttgttagatccactcgtaggtgtctgatatttttgatgaggttttaggcagtgccttacgttgtatttgcaaattgttgctggaatatacaaatgcaattgaattctgtacaccaatcttgaatcaagtaacatttcaaaactcaagctgggtgtggtggctcatgcctgtaatcccagcactttgggaggccaagggaggaggatcacctgaggtcagaagttcgagaccaacctgaccaacacggtgaaacctcacctctactaaaaatataaaaattagccaggtgtgatggtgcacacagctacttgggaggctgaggcatgagaatcgcttgaaccccagcaggtgggaggtgaaggttgcagggagctgagatcgtgccactgcactccagcctgggcaacagtgcaagaaccagtctcaacaaataaaaaaaaaaaaaaaaagaaagaaactcaaagtgctcgtttaaagaatctgttgattcttttgaatatgctacacgcataaccacatcactgaaaatgacgatatcagttctgatcttctggtattctccatgcctggccctctctgatgcttgcttgcttcttttcttttctttctctctcttttccttccttccttctttccttccctctctctctctctctttctttctttcactgggattacaggcacgtgccaccatgcctggctaatttttgtatttttagtagagacggggtttcaccatgttgcccaggctggtctcgaacacctgggctgaagggatctgcccacctcagcctcccaaagagctgggattacaggtgtgagccaccgtgcctggccccctctgatgctttctgatctcagtattagttttctgatctttcttgcttccccttatttcactgtccaggacccccagtaccatgctggccagaagtcgcaggggagaagctctcaatatctcgcccctaaaaatgccgctgccccaggttttctatacgttcccattactagttaaggatgctcccttcaatcagcggaggctataggggagcccaacagtggcctggaagaggcccacccagaaaaggacagttgatgactgattgagagtggaggaccctgggatcaggcagctgctccggccactgaggtgacccagagctgaagaaagatcagcatgtacaggtgggctggcatgtggggcaaagctagtacctggataaacttctccatgtctcccccaaagagtctctggttatactgggagctggggcggggctggcggctcttctggaattttctctgtgtgtactgggtcctgcagtgaatgggagctggctctgagggggccaggtgtggagaatagggtgccccaccccccaggccagccaagccggcctctaattctctgaagttattccacaatccagtgcgaaaactggggaagtgaggcccaggggattgggcagctgagctgggccccaggaagagaagagatggcggaccgtcgcagggccccagccctcagggaggactcaccaagacacctcctgctcctccttgtcacctgtggggtgggagaacattggtctgcctctcgggccaggggtcttcaaggcatcccagagagaaaggtgtggataagagccaaggacaggcgggaggggaggaccgtgggctagacagggtcctgggcaggggagaggcggggaagggggcagcactgggcccacctcgctgaagggcctcctgcagcttctcgtgcttggcctgcagcttggcgaggatgctccgtccactcagatactcctggagcttctgggcagccccaagaagagccccaagtgttagccctggcttgagcccctccctctgccccagcaatgcccccacgggtcccgcccaccagcccagccctccccaccgtgaggtagaaggtttcggtctcctgctgctggccgcgcctccggcccgcctgccggctgcctgggtctgagctggtggacttgagggactcggtggaggggctggtctggaaggaatcaagcacatccccgtcatccgaggccaccacctccagcagggcctgcagtgtcgccttcagagtcttgttcacctgcagaggagaccacaccagggtggtaagaggtgggggacagggagggagacaggaagtccaagtcagaaggaaggggccaaagggaggggggcaggcagggcagccacttccaacagcaggctgtacaggctccaggccctcgtctccctctaacccccggtgggctgcccagacctcctctgtctcaatggtctgtcggtccaggcggctctggatgttctgggctctgggcagaatctcgtcccgcagctccatttcaacgcagatctcagccacctgcagagggcggcggccagggggctaagggctgggcttgggcagtaggtgccaagatccccggggcataagggaagcaagcacccttttgtggcctggcggccgggcacaggaccaccagcccagacgctcagctgaagaatggcaggagtgaacacacgtgtccaaaccaagacttgtccacagaggttcgtggcggcaccactcatccaactgacggatggctaaactcagcgcggtctacccacagaatggaagaggattcagccacgagaaggaatgaatccacttatgtgaagtgtccagccaggcaaatccatagagacaggaagcagagtgggtgccagctggagcagtggggtgccagtggggctggagaggagaacggggagtagtggctcctttaggggtgacaaaaatgttctggaattacatggtgatggctgcacaaccaccaaattgtacactttacagtgctgaattttatggtatatgaatcgtaccttaataaaactctatttaaaacagaatggtggcccggcgcagtggctcacgcctctaatccaagcactttgggaggctgaggcggatggattatctgaactcaggagttggagaccagcctggccaacacggtgaaaccctgtctccgctaaaaatacaaaaaattaactgggcacggtggcatgcgcctgtagtcccagctacttgggaggctgaggcaggggaatcgcttgaacccgggaggcggaggttgcagtgagccaagatggagccattgcactccagcctgggcgacagagcgagacgccatctcaaaataaaataaaatgaaatagaatggtaaggaagactggggtctgagacagaacagggagagcccagccccacctcttccagggaaaggagtggacggaaaaactgctcactgtaactgggcagacataaatttccctgtggcaagatgagagcagcttgcctcatgggcagagtgggagccaacgctttagaaaggaaggaattactcttttaagcatgtagacatctagaaaattgacattacagttaaaattgagagtgaggattcagctgtggctaaacacttgccctgctctccatctccaccaagccccgccgtacaggactgcatgaaggcgcaagtcacagagtagaaagtaaggccattttgagatgggctccaacatggctgacccttgaggacatgggactcagtgaaaggagccagtcacagaaaggcccgcactgtaggattccactcctgtgaggggcctcaaaggagagccgtgaactctgtagagacggacagtggaagggtgggtgccagggctggggggtggggagttggggttgaacggggccagagcttcagtttgggaagatgaacaagttctgcggctggatggtggtgatggctgcacagcaccgtgaatgtgcttctgcccctgggccgcacacttacaaatggtgaacgtggtatgttttatgctatgtgtattctgccacacctttttttaaaagtccatctaggctggactggctcacacctgcaatcccagcactttgggaggccgaggcgggtggatcacttgagcccaggagtttgagaccagccttggcaatatggtaaaaccctgactctaccaaaaatacaaaaattaccctgtctcataacctggtctcaaaataaataaataaataagtaggttaaaaataattgtttttaaagtacaaatcttagccacgcatggtggcatgcacctatagtcccagctactcaggaggaggctcaggcaggaggatggcttgagcccaggagttggaggctgcagtgagctatgatcacaccactgtactccagcctggacaacagagccagaccctctctctagagaaaaaataagtgtatgcatactctggggaacattgaaattttatccctcctctaaactcacacgatcagcagaaaactaacaatttgctctctggaaaggatatagcagggattttggactcagggacactggtcccagatgaggaagatgagagaacacagcagccccaccatcggaagctggcctggtcctatcagcccggcctcagtgctgtcctgctgaacaccggaaatgacccagagcatcaacatcaggcaaggccactgtgtgaccttgatgggcgaagacagaaacaagaccactctgcgatcacgcatgagtgaggacaaaatcaagaacttcttccgagccacaaaatcatccctccatcctggctaatgtaagtgactgtcacttccttgcatcacttcagcctccatcactgtctctttctagataagattaatcaagacatccaatcatacaattaccctgcttccagaaggcatccaatccaggaccaagccccacttacctgggccctcccccagatcccctaaggcaagcccaagtcctctaaggcctttccactaccctctcactgagaggccccaggctccccacggagcagggctccctccagcaatggagattatagggctgttcctgctaggctttggctggagggtgtggaactaaaaccaggtagttccaaggaaatccacacagcagagtgagcccccagccctctcaccccctctcctccctagacagggtcagaagagtttctactggggaaactggccgggccaggaggaaacaccacagacacccacatttgtggggtatgtgttcaggcctcttcttaaatatgaactgatggccaagaatcaccaaacagacacgatcagcagaaaactaactatttgctctctggaaaggatatagcagggattttggactcacgaacaaaagcaagaaaatagagcaaatgcaggaacaggagaaaacaaaaaacatttcaggccgggcatggtggctcacgcctgtaatcccagcactttgggaggctgaggcaagcagatcacctgaagtcaggagttcgagacaagcctggccaacatggtgaaaccctgtctctactaaaaaataaaaataaaagggtcgggcacggtggcccacacctgtaatcccagcactttgggaggccgaggcaggcggatcacctgaggtcaggagttcaagaccagcctggacaatatggtgaaaccctgtctctacttaaaatacaaaaatcagccaggcgtggtggcgggcacctgtagtcccagctactcaggaggctgaggcaggagaattgcttgaacctgggaggcagaggttgcagtgagccgacattgcgccactgcactctagcctgggcgacagagaaagagtctgtctcaaaaaataaataaataaaataaattaaatttaaaaaattaaaaaattagccaggtgtggtggcaagtgcctgtaattccagctactcgggaggctgaggcaggagaatcacttgaacccaggaggcgaagtttgcagtgggtcaagatcgtgccactgcactccagcctgggcgacaagggggaaactccatctcaaaaaaaataaaagcttcagaaagattcaagaagtactgtattcatgaaataagaataaagggttggccgggcacagtggcacacctgtaatcccagcactttgggaggccgaggcaggccaattgcttgagcccaggagtttgagaccagcctgggcaacatggtgaaactcccttgctacaaaatatagaaaaattagcctggcgttgtagtgcaggcctgtagtcccagctacttgggaagctgagatgggaggaccagaaggttgcatctgcagtgagctgagatcacatcacacccctgcactccagccgaggggacagagtgagaccctgtttcaaaaacaaaacacaacaaaacaaaacaaagaatacagacattttcagatgtgcaaagtcaggaaacccttggtgaaggtgtcaccaaaataagggtatcaaactaagaaagctgctgccgtggaatccggaaacagagcactgggcagaagtgaagcactccagactggaaggctctgggggagggcgcagaggagaaggttgacctcacaggtgcctggtgtggaggacagtgctgggacgaggtagcgatcaactcctagcaatgggcatgttctagcaagcagcattcctgaggcaagagagttataaattccagaagaaaaggaaaaattgtccaaggaaggacatgtgatcctaatacagtacatggctcagctgccaacagtacctgttgtcatggtgatttaaacattgaatgttaatttagccaaaaattctgggataagcccactgggagaacaagatgcagggaagcgtgtggtggctgtgagagatgctggtggcactgggtcatcattggccaatggaaaatggctgcttgacaccgggaggtgggtggctgtttctgggggtgggagctgggaacgggaggggtgggttagggagcagctgtgacgccatcggaagccctggtgatgccggactcttcgtaaagttccaagtcggcccgaaaggggcccaatgtaatcccagatcattgacaatgcccatcaggataaactgctgcaggaaaaactagctcgacggagaaggataaagaagccccattccatcttactgccaagtttgtgtcacgaaatttaaaaacacagagaaaccagcctagaacaatgtatgggcagctacacggctgcctgctgcacggtttgaacagttagtgtcttgccctccttggccattgcgggggtgcacccttggagtgaggctgcaaatggaagtgggacacttctctagctgccgcactgcctgagaccatggagaacttggattcctgagcaaagtgtgggtcatgccactccactgcccaccattacagtgaaggccagagaatgccaagcccagcagggggtgaccctcacctcatccccatcatgggggtggtagtcaaagcgcagcgggggacagaagacggtagcatgcacctcgagaaccttggctttgtcccctggaggatccagggcctccacagcttcttccaggctgcccaggccctgcacttgggaggcttgggtgcggctctcagcggccgtgtagctccggagcacctgccccagggccaggtggaaccctgtgtcacagcactgaggaggaaacaaggagatgcttgggtaggtcctggagccacagcttcccagccccgaggcaccaggcaccttttcccacctgcccaccaaggactcacgtccatgaggtccaagacgtcatgcaggtagtagttactgacagcagcgttgacactagccaggctaagcaggtactcgttgcgcgcctttgtgcacttgagtttgtgctccatgaacttggcctgccgctactcaagacaatgcaagcgtgccagggtcacgcacgtggccagcccctatctctagcctttcatgtaatgcccatcgcctcccctcccactgtggacaactacacctgaactggtcaagcccagaagtcctgctgccttccccacgccacagtccacagtgtgctcagcccagtgccaggaggtgacttgattccccggctgttcacccgccacttgccttggttcgagccacaacattccccacagaagtgggggatgacacagaactattcacagatacctgatgagtggaaggtgcgcacatggcaccccaccatggagggtgcacgagaaacccagcttggagccagcacacaggtgcacagctggaagcggccacaggcctctgcgggggccagagctgagggggaacgagtaccccaaagggtagggatagatcatcaagagccatgaaacagaacctgctggcacctgggttctaaaactggcactctattttttttttattttttttttttgagacagagtctcgctctgtcgcccaggctggagtacagtggtgcaatcttagatcactgcaacctccgcctgctgtgttcaagtgattctcccgcctcagcctcccaagtagctgggatgacaggcacccgccatcatgcccggctaatttttgtatttttagtagagatggggtttcaccatgttggccacactgatcttgaactcctgacttcgtgatccacccacctcagcctcccaaaatgctaggattacaggcgtgagtcaccgcacctggctaaagctggcacgctaaccacagcagccagggagaccttcccccaacacagccaaactctgtcatttcccctaagaacacctgagatgctcgactccctcctctgctcccagagtcccagagaccatgactgtcagccacgcacagcctggcggctccatccaggcatttcccagcctccccactctctgtactgggctcacctcgaaggccctttctccgtgcgtgtcaccccatcacccaccctaagtgtcttcttgcccccctctgaaaccttacggaatggctggcagaacagcagagctgcaggggccccgctgggagcatggagaggctgcatggggctgtccagggccaggcaactgttttccccactctctcaggccctgggagccttccgtatggaatccctggaacctgatggcactgtcctgccactcctgccctcccctgcacccagccctgacttccccctcagcacagcaggtcctagttagggcccatggcccataggcctgcgtctgaggtgccctccaggcccaccttctccaccagcctccctcccttcttgagggagctcttgcggaggggccctgcctcagtggcaccagcggtggtggtggggacactccggcctgcccgcttctcctcctgccgctcggcctcccggagcttggcctcggcattcacgctctccatgtgatatgcctggtacgtcttcttggcctgcagggagacccaaagcaaggtggtgctggtgaaggccacggctgggccagcccccagccctctacccctgcccctctggaacttggacctcagagctgggcgatcccatgtgagcacttagcctaacgccctgtgcctagggagagaggcctttgcccctaggtgcgtgcttctccctgagcctggcttggggtgatgtgatggtctggcggtgttcctccccactgtgagtggcatttctccctggaccattggggcaggcccctccccagccctttcctcaccgtctggagctctgagaccacctccaggagctcatcctgcagctgctgctccagatccctgctctagaggcagaggcaagggtgagcacggcactgcccagagcggccccgccaggcactggaagctctgcccagatcaagccccatcgggggggcacacaggttcgctctgcctgctccccacctggcctccagtgccctcccagccacagtgcctcctgatcccaaagcctcgaacacttcccgtggcccaggatgagagcctcaccttcttgaccaggcgccccacgtcctctgcaatgtgactcaggcgctgggccaggggcccggccagcacctcactcagggccgcgctctcccggctctgctgccgcgtgtgctgcagcagcaccgcccagcagtgcaagggcgacaggagggacggctccttcctgggggtagaggggcactgagacctgggagcggagcttgggccctgccgtggcccccctgccagcacatcacctaccggaagctttggtgctcccggctgctccccaggcggcctccacggctggagaagcgctcggccagcttttccaggccccgggagtattccagctccacctcagcgcggcgccgcatgaactctgccagctcctgcagcaactcccgccgcagctcgccctgcagctccaggcagcgcagctgctcgctcagctgccagcgcatctctgtggggggaaccatggctcaggcctggtcagcacgccctgcctgggtcagccaggccagcgtgggatgggagaggcagaggcacacagaccccagtcccgtcggctctgagggctccttcggacccagcctaggctgagggcaagagctaagaggggaggaaagaagctaggcccctgcaggcagatctggcctcagctgtccagccgacctctgcgctgaggccaacagatggccagagccacccggttgagggggaaggggaagggtgtcccagagagaggggagagccgccccagcgccagccaggcacctttcagtttggcttcctgtctctccctcgttcctggaaagcctctgaatggtttcccctgcgacttcctttcccgccggtacccaggctccgggaggtggcagcctcccttgcaaacacacggatacacaacacacagatcacagtgctgctcagggcaagcctgcagcgatctcgcagtctcagtggctggggaagcctgccctcaggccccaggggaaaggacagtccacagtgagggctgggagccagggagagctgatccggccttgtaagtgaaagaatggggcagggagctagcccccgtcttctgaccccacttcccactcccaatcaccccccgccccacctgtgcattcccccaccctgcagagagagtcacacccagggccccatactgccggccttttgacaccctatcactggcttgatttggcaacgctgcttcccccacacaggcctgaagcaaagaagtgcctgtccagcaagtttaagcaacctgcggaagacacttttgccatctcctgagtgcccgtcccgagtaaataagatgctagctcagcttctggccagcaggctgcccacctactcatctccatccacatccccagggagggacatgaattgatgtcttcattcagcagaatgttgattatgcacccattctgtggcaggcacgttttaaatacaaaggcaaagaggtttgaccaagtgtctgccctcttggagctgggattggaatggggcacgaacacatatcagaatgcccaggagtgatgggtgcggagaagatgaacccacaaagcaagatcagagccaggggtgggtggggacagggaggacctctttttaaaggagggtggtcaagaacaagccgcatcgttggagcagaaggctggagctggctgtacgtgggcagtagggggagtccgagagaccggtagggacagatggcacagagcccggggtctgggcagagctcccagctggactccgagtgagagaggagccacagtagtggggtgatgtggtccagcttcgttttcagggccccctcacactgccaggtggagcccaggtggcagctactgtgctagtccaggcaaaagacggcaggattcagaccagcagcagcgagggaggactccgctgagaagagctcaatcccattggatttctgtcccgccagtgacttcccaggggctgttgcatggggaccctgtgggttccgcctgcccagcatccctacctcctcccctgatctcctattggagaatgtccccttcctagtctcagcccccttgactccaggtgccccagccctggctgcatgcgtcacccatccctctgtccctccactccctgcccccaccagactagccaggtgagggacccaggagcctgacccttccaattgaattactgaacaggagagctcttcccaccggcagatcaagctgggtaagtggaagcctggggcacgggacctcccgacagagcagggcagagcccacgatgccaagtgagacagatggagagtgtcttcatcctatccgaggctggcctcctgtggttaactcgtcagctccaaggccaggtggggtgggcgctaatgccatttgaaatcaggagagtcctcactgaatcagtttaacgttttgttttgattttttgttttgagacggaggatgttgcccaggctggagtacagtggtgcgatctcggctcactgcaacctccgcctcccgggttcaagcgattctcccgcctcagcctcccgagtagctgggactacaggggcgcaccaccacacccagctaatttttgtatttttagtagagacagggtttcatcatgttggccagactgggtcttgaactcctgacctcaggtgatccgcccgcctcggcctcccaaagtgctgggattacagacgtgagccaccacgcctggcccagtttaacattttttgataaaagtaaatttcatttcattccaagaaaggtgttagacaactgctcgcctcactggccctctggagcctgccctgccctgcttcccccagaggaatacaatccctggggacttatgacaactgaacagtgcagaaggaaccagcagagggaaccgctgcctttcttcatcactgccggcagcaaaagctgactggaagccatgtcctagtccagatccgggcatgcacaccggctggtgttgagcaggcaacttgtgaattgcaagtcgattgcattggtggctttcctggcagagctttcggatctcagttcagacaaactcgtcagcacaccctgtcctgacctccccctaaactagggctggccctcttccgaccccttcttggcaccgtgcactttccttccctttgtagtgcttattatcataatgcaaagtctatgtctcccccactagacccgtgagccatgtgagggcggggtggccactgacgccatttgaaatcaggggagtcctcattgaatcattgcttttactctgggtaaaaagccagggctggaggggctggagtcggggttctctctggtacagcagtatactcccagggcctgggacagcacagatgtataggaaacatctggcaaaaggagagctggaatccatgtctgcctgaattacagagctgggccccgggccccaccagcacttcctgtgagcaaggcatttggtctcacttctgctgacaagcaaaacagaagaaaagatggtctccaaaaccaccgctatgctgacctttgagaatttagggtgtcaagacagtgaccccactttgtagaatggtaggaagcttttccagggtgtgggatgcagacccagagcaagtgaggaacccttagacagtcgtgctcgaaaccccaacttttcagtgtgaaatcactgacccatatttgctgactgaagttttccaagtctttcagcttcatggcattttggggaagcaggatggagatcattacctccatctgagcaagatgatggcgaggcttggaaagctggctcaccctgtgtagtcacctcaagctggctctggacacaggctgccttttccaaaggaggactggagcatactttggtataaattgcttgcactgaataatgatgttagaacctacatctctgggttcaaaggcacttcaagggtcattgcattctacgtcctagaagttgcagtgctgtatgaccacgggcaagtcactgcacctctctgagcttgtttccgtaattggtaaaatggagtgattgagagtgatatggacgagctgctggcactgagctgctgcctctttcctttgcaagagttaccatgccctgaataagatgggcacaagctattggctaagaatttgcaaagctgatttgcatgtgatttgcacatgggtgtttatcagaacccagaggttcaatttcagaaggctgagaagccagccctgttaaatctctcaaccaagactcactgcgccagcttgacccagagacagtggccctcgcctctgctccccctcagtgctaaagggaggcaaaaggtgctgaagctccagggactgcagtggggttacggccaggtgatctccaccaatccactcacccggactcccttactcaccccccagcccaatcaagctggttgacttcactgtagctaaaatactgccttctgaggggcacgttgggtgcatctggctctcttttaccagcggccaccagtgtctccactgaaccttgggtgagaagcggtagacccaaggaggacagagaccaaaggaaggaagacaggaaagaaggaagggaaaatggcaggcggttgaggccaaatgggcgtcgggaggcaggcaaggggctcaggctccctcctccacccccgctccagaggtcgctggggagagcatcgggccctgggccagcgcggggacgcttggagctccctcacgaccttgggttctccgcaggaaacgggccgggagcgcccggcgccctctcacctttgacttgcgtctcatactcagcctgcagcccccgctcccgccgcagcttcccgtgagcggccatggcggcctcgcggccgcgccgtcgaaccccactgctcccacgcggccgtgagcgggcccggcgccgggacttgggggcgctgcggccagcaccctgcgcgggctccgcccagccccgcccccagcgcggctcccggtggggcggggcggcccagggctggcactgcccgcgaggggctcctgggggggcagggcgccccttccagccccactgtgccccggccttgccgtcccctcccattgggcctgcacctaggctgccttgtgcccaaagccccgctgccaagcagccggagcaggtgtgagagccccaacgtaagctggcatcccaggctgccatcccaccacctccagaaggctgtccctggtcaccactgccagactgtaccattcacagcggggccgctggcccactgtaccagtggccatgaacaccattgctgccccaggctctggactccccctgggttgcctccttcccccagacatccgatggggtcctcccttcccaagtcagcccccagagaggcccagggagccccagggagccttgagagctggggtgggaagttcagaggggagggggaaggaaggtcagcaccagagagcagaacctcagcagctggctgccgttccctccaggcccccttggtaggggaggagagttcagctccggttccccttctgctcagccccacaatttccccataggcggttaccacttcctgctgccggaagagactgctctgcctcccttcccctgcagctgcacctgcccgtcataggcctgaggggggcagccccctcggagtgaggtcttagctaccctgggggcaagtcttggggcccccctcatccaggggtggtggggctttcctccaccctctaccacagggcagcagcttttctccgggaaatcgggaaggcgggaggcgggaggcggttgacaagccaagcagacaactggcttcaatttggtgggagggaaatccctggggtatagatgtggggagagaggcaaggcacttgggcaccaggcgtgtgttccgaaggcgggcgtgggggcactagtgcaggggtactaggcgtgtgtgtgcacggatgtcagagtcaggctctgtgcaaatgcgggcacacatgaccttgacctgcagatctggggaggggaggctgtgcgggtacttcctgcctttcaactgtgagcaattaattctcttgcccagaaggaaaaaaacactccctcagctccccgcccccttctcccagtaccaaggcccttctcgaacacgtcgtcgtgtgtgtctgcaggacctggggcttcaaggcctgggagctagccagacccaggacctggacttccagcagctggtctcggaagtaccgatgttcgagtcctccagcgagactagagagcctgcgcccctgcccacagcgcgtacagccgcacccacactccaacctgctcctggtcgggagactcacacgtcccaccgctgcctcaggccaaggggaaccagggagccccgcctctcactagctggccccaacacatcttgcccctccatccgagccctgactggtccccaaaggtccctccacccagcagagccagccacagggctcaggcaggcaggaaaggcctcagccggtgccttcaaacgctctcttcactccttttttcactccagagctattcctaggatgccccattcagcccgtactttagggcctgagtgttgggccctggcttttagggcacttgtttggcatttaaggccctgaacgcaactgccccctgctgctccgtctatccttcgctccattgttccccttcaaagcatccaaaagccaggcagcccgcagaaggcgcggacctgcccgcatggggacggaggctcagcggccgacaggcatcgggcccgccggggacggacggcagagggcgggccgggtcccatgggcctggccggggcggaaggagggcgccgtgggcgccgtgggagcctgggacacctcccttccaccggtgccggggcgcggccgacgcagtgcgcaagcccgcccttcccccgcaccctgcgcgcgagcccagtgccgccggaccaatcagagcctgggaacgaacctcgccgcgggcttgcgaaccggaagacactgccgccaggcgcggggcgggacaggactccgcctccggcccatacaaagggaagcccacgtcttaagccaatcaacacagcctcgcccgagccgggaagcggagagctgtgggcgtgcgcagacgcgcctttccggccccggccccgccctgccgcgctctgggctccgcttccacagctgccggctgcctgctggtcacgtgcgaggcgccagccaaagagaaccgagctccaggcctgtgtggcgagttttcaacccggcggaggagcagtgtgccacctgcagtagcaggacacagagagggctcaggaatacagggcccgcccaggactagggacagtaaatgatggctttgcagccggaggggagggaagggaaaggaggaaagacacagaaacgagcgttacggttagggtgactccatgaaaaacaggattttgatatatatgtgtatatgtatatatatatgtatatatatattttttttttttgagacgggtctctgtccctggagtgtggtggcatgatcagggcccacagcaacctccacctcccgggctcaagcgatcctcctgcttcagcctcccgagtagctgggattacaggcatgcaccaccacacccgggtaagttttctatttttagtaaagatggggtttcgccatgctgcccaggctggtctccaactcctgagctcaagtgatcccgcccaccttggcctcccaaagtgctgtgattacaggcatgagccaccgcacccaacagccgcccagttttgtattttgcatgaaattgttaatgagggaatacatggctttatgcatttgtgtaaccccatagaaactgtacaacacagacaggaaacctactgtaaaccatgggctgtagtttacaataacttatcagtattggcgcatcaacaataacaaatacaccaactaatacaaaatgtcaatggggaaacgcggggaattgtactaaaaataaattattttcaaatgcaaactcaggttagggagtagactcaagaggtatcatggactcactgaccattagggtggcaggggagggaggactcaaggactgttgatggggcatctggctgggtcattactcagacaggacatttgtagataagcccaatgagcagttggatgtccacatctggagcccacgggtatgctggggagctgctgtagcccgaagcaggtgtgattagggagagaaagtctgaaggtgaaggtgggaagagaactgaaggccaccaagagtgggagccctgctgttgagctttgagcctgagcagccccggcttgtgccacaaaacacattcagcgtggccaagcagacctccaaggcagggtctctcccataagtccagggcctccttccccggggccacagctgctgaaggtcatgagactagggagtcccacctccaaagctctttccttgtactcgggcctggcaggatgctctgggtcaaaaggccaaggctcacatccccaccagaggacctggagaaacacaccctctaaatgtgcgcgcgctcacacacaaagttccccagtgccacggagcgaatttattgtgaaagctcgtggggtgaggaggggatggggcaggctctaggaggctgagtcggaggcctctgagctgtccttgacatctgtgctctctgtggtctcgctgacctcgctgaggtccttgctgtccccaccactatcctcggcagccaggcccttctcctcgcgacaggcctctcctgagctcggaggtgaattgcctttgctctccaccttgttctcgatggcacccagcaccacgtgcctgcccttctctttcagctccaggtgccgcctcagctgccaccaggaacccagggagaaacgggggcaaagagacagggcctaagtttccagacaaagggagcctggccctgtcgctggctgaggagaggggcatagtgaggcagcagggctaggcaggacacgcgggactgagtggggacacctggctggagccccagtccaccgctacctgggcttaccgactaccatggaggcccccacgacagagcgctgccccttgaccagccctgccacccgatgagccttgggcagaaccctgactcagaactacctttgagcaggcaggccacccactggtccctagacctccccacttcccttctaaaagcctcctccctctgcctctcccatcaccctccaggctgctaggcagatggcctcctctaaagcccagcctaggaaactgaggtcgtgactcctggcaacgtagccacaagagctggcatccaaagtcggtctcgcctgcagccactgtcttggggctcctgagtgccgcccccgctcgccttgcttggcttcatgcaggcgcttacctcgtcggccatctgagtgaggtcccgcttcatggcataggcgtcctccccatctgcatagtatttgggctccacttcactgatcctgggggcagagggttagagagcaaggaggaagacctgtatcccggggacaccctcctccactcctggtatcgtggctactggagcaaggtgccatgttttctccctgaaggctccatcctgagacaacaagtccagtgtgacctgccctctgttctctccagcaaaggctccaggacacagcggcccgccccacccgtcctgcccccgttctgtgtccttagcctggatactaaggatccatttctgcggtttcttgtgagctgaagccctgaattcagccttccccttccctccctgccctgcgccctgtcccttactgagctgcctcacaacagccatcagaacccaggaaagacggtgagccctgcctgagcagctctggggccgtgactacactgggcaggtgtgtgtgcagactcgcgtggccatgtccctggaaggggagctggactcaatggcctaggctggccctgccaggcctaagacatgaggattgctgacttagctataaagcaattcccaccagacatcgtcatctgggtcacagatccctcttgccagcatccagcccagaggccaccgcccttcccaacagtccctcttcttcatcccctaccaaacgggctgagtgcagttagtgtccctccacaggcagcccaccccagcttcacttgcaagcacttttttccactgtctactgggcatgccaactgccaggttctctctagtgtgctaggcacacggggcctcctggtcctcaggcagacctcccccatccactaggctgcctggccactggcccttccttcctgaatgtgcattctcctcgattctgctctctcttggattcttctaggtgcttggtcatgcttgagtcctgctcctcagcatctgctcacgccagggacccacacctctctattcccaaacattactaaacagcccgtgtgcccttcgccagcctcagccatcatgggccagagctcctccatcacaacacatggagcacgtttcagcaggcaggtgctgtctccatgccggcttttcaaccatcagccgccgagtgaatgtggaggtatcctggcagtgctggggtccacagcctcttccccacagccggcccacccccgacctggaaggcaactcagccggtctcaggtgccctgatgggccagacctgggatcaaccccagcccattagaaaaatcgagatctacttactgaaagttgagggtgttggaatagaggtgcagggcggcccggttactgcaggggaacaaggcactgctgagctgcacggatttggccagggaggggtagcacgtccaggtcttgcccctcctcctggtccctccttccccccaatcccacttcctggatcttcaccaaaagctgaggtaccccaggacccccgtcaaggcagtatctctccccctcaatcccccttccctcagcccggcttccacctcttcctgacatgcagggagacatatttggcattgaagttctctatcatggctcgagaggcctggtccatcagtttctgagccagaccgaggcgccggtgggaacgcttcacagcctggtgggagaagagcagagatggggtgagggactgggaccttgagggctgccccaactaacccccacttccacccccaccagagagcctgggtggaccttacataccaatgaggtgatatgtccatggggcacatcatctgggtcctcttccctggagagggagaaaggagaggctgcaaaggagctcagtgtaggcacagccacctccagcccccctgccatttgtagagtggacatgcactacagccccctaagaccccagctgggggagagccgggagcctcttggatcagagcagccgatcctgccaccctctgctgcctgaaaaccccaagcctgccgggtgtggggcacacgcctatagttccagctacttggcaggccggggcaagaggactgcttgagcccaggagttcgagaccagcctggacaacacttttttttgtctctacaaaaaaaaaatcaaaaaattagctggatgtggtggcgcatgcctgtggtcccagctacttgggaggcagacatgagaggatcacttgagcctgggaggttgaggctgcagtgagccatgatcatgccactgcactccagcctgggcaacagagcgagaccctgtctcaaaaaataaaaaaagaaatgagctgtcaacccacgcaaagacaaggcagaagcttaaatgtgtattactaagtgaaaaaaagccagcctgaaaaagctgtatatagtatgattccaactctgtgacatcctggaaaaggcaaaaccatgcaaacagtaaaaaatcagtggttgccacgggttaaggagagggagggatgaatgcgtggaacacagtgaaactatcctgcgataatatgaaggtggacacatgtcatttggtcaaaaccatggggcttacaacacaaagagaagtgcagtaatgtaaactatgggtttagttaataataatatatcggccaggcgcagtggctcacgcctgtaatcctagcactttgggagacagaggtgggtggaaacacctgaggtcaggaattcgagaccagcctggccaacgtagtgaaaccccattgctactgaaatatacaaaaattagccaggtgtggtggcatgtgcctgtaatcccagctactaaggaggctgaggcaggagaatcgcttgaacccagggggtggaggttgcagtgagccaagatcacgcgactgcactccagcctgggcgacagggcaagactccgtctcaaataataatagtaataataataatagtaacatatcacattcatttatcacttgtcacaagtggaccacacaaatccaacatgctactaacagaggaagctggcagggaggggatgctgaggggtgctataagaactccatgtcctttctgttcaatttttctataaactttcaactgtactgaaaagaagaagcctattcattttttttaaagcccacagaggcatccaccagacacgtgtagcttctgtcttcctccttggtgactcacattttggccaggacataccccacaatcttcccattctcgtcctcagcaatgtaagagagctggtgacaggaaaacagagtgagaaaacttcttgtcggagctagaagagccctttagagggacacaaactggacgagtggcgagttgtgtgatggctcatgacctccgggctgagtggcttggtctccccctcgccacactgtgccctgcccatacccagaaagaagacgcaaagtggggatcctgcccctattctctgctcccttcgggcgccttcttttcctttgcccctgtctgccagctgaaaacacccaggacgccaccgaccatacagccccctgggctctgacagacttgtccactccctccaagatggccagatgggattttcctcggcctgctttcccccatgcccaaattcagaagctgcccacctggggccaggaaaggccatggtagaagtagtatttcatctggtagttctcgggcaggcagaggaggttgcagtgctgcatgttcattaggtcctctggctgcagggaaggagggcagtggaacgcgctcagtctaaggcggcggtgaccacgggtgagaagcctgctccccgtcggtctgctcggccccgctccctcggggctgggcaggcactgtgacgatctgactttgcacaacgcccggagcacaggaacaggagtgggcgccccggaggtccccggagcccacccaacggaggcccgacatcacgcaaacaggagggaatcgcagccccggccccgcgccccggcctcttcggcgggctgggccagccccataggtccagcggccgcaggcacactcagggccaccgggccgggctcggccggggccctcgggagcatgcgcggcagccacccggcccggcgcccacgcggcgcggacagcctcccgccccgggcgctcaccctcgcattgcggatgttcataacggcggcggggctcgcgggtcccagcggatcgtgaaggcgcagtcagctgccgccgcgctccgaagcgacgccgggacggccggggctgggaccggagctgggctcgctgggcgacggcggaaggggcggtgcgcgccgggccggccaccggccggaagtgcacggccgccgggcccgtcctcccggccgcttggccaatgcgcgggacaggccagcgcacggggcgggccaatgcgcggagccggtcagcgcggggcgggcctgggggcggggcgggcgctgccccggagctggagccggcccctccctcggcgcgacagcccccctcccgcgagcccacagacgcgcgcacagccgcaggtggagcggactcagcctttattccgcgcctcggcaggcgggggtgggggcgggggagggggcgggggcggggcggctcagcagggcgcccagcatctcctcgcacatggctaggcaccgcggcacgtggaagcagcctgcgggtagaggcgggcaggtagtgagggccgggggcagccgagaggcgcaacccctgcggccccgccctctcccccactcacctttgaaaggacctcccttgatggagagggccaccttgccctctcggctcaggtagccaaaccattccccgtactcgggatcgcgaaactggaataacagagacagtgacagctagcgcctgcaggacccgcccagatgccactgcatcgctaccaggggtcagagcctgggttgaccccaggtgacgtggctccagaaccagcgatcttaaccgcgacactgcgtcctccacaaagatgaaagcaggggtgggcgcagcaggcaggctacaactatataaccgactgggcaaggggatgagacactgctagatggaatgaaagaactctgccctggggtgtagaaacgttgtctatcgggccgggagctgtggcttgcgcctgtaatcccagcactttcggaggccgaggcgggcggatcacctgaggtcaggagttcaagatcagcctggacaacatggtgaaacctcatctctactaaaaatacaaaattagccggacgtggtggcacgcacttgtaatcccagcagtatactcgggaggctgaggcgggagaatagcttgaacacaggaggcggaggttgcagtgagctgagatcacgccattgcgctccagcctgggtgacagagcgagactccatctcaaacaaacaaacaaacgaacaaacaaacaaacaaaaaagttctctattgtgattgtagtcgtggttacgttgattcaaagaaacaaagaacccggccgggtgcaaaggctcacacctgtaatcccagcactttgggaggccgaggcgggcggatcacaaggtcaggagatcgagaccatcctggctaacacagtgaaatcccgtctctactaaaatacaaaaaattagccgggagtggtggcgggcacctgtagtcccagctactcgggaggctgaggcaggagaatggcgtgaacccgggaggcggagcttgcagtgagccaagatcgcgccactgcactccagcctgggcaacagagccagactccgtctcaaaaaaaaaaaaaaaaaaaggaaaagaaaagaaacaaagaaccctgatggaggcgacgacctgtcatgaaactcttaagaagtgactcccttggagctcccattcccggcttcacaggcctgtcttccagtagatgcacaatctcatctgactcctgtcctggctcaccattggtcccaaactcatctcctcctccctctgcccctgcccagtgcccattccactctctttccttctctctccactagcattccatggggcacctgtctcagggaggcttgtcagttcagccccttctcaaaaggatcatggactcaattacattgaagtccactatgaaaatgtctctttaaatggtggcccataagagttggtgtattcttctttgtaggaagtaaaactagtcctgggctgggcacagtggctcacgcctataatcccagcactttgagaggccgaggcgggaggatcacttgaggccaggagtttaagaccaggctgggaaacatagtgagaccccatctatacaaaaaaaaaattaaagaattagctgggcgtgatggcacacagctgtagtcccagctacctgggtggctgaggtggaaggatcgcttgagcccaggaggttgaggctgcactgagccatgattgtgccactgcactcagcctgggcgatagagaccctgtctcaaaaataaataaataaataaataaataaataaataaataaataaataaaaactagttctgtgtgtattcattctgtcttttgagttacattgttcaagtccttacttattttttgactgcttgacatgacacaggaaggtaaagaagaatttccttcaatgtctggatttttgccttctgtattctgttatgttggttgatgcataatgacttacctgtttttttgtttgttggttagttttttggtttttgtttttttaagacggagtttcgctcttgtcacccagactggatggagtgcagtggcgtgatcccagctcactgcaaccttcacctcccaggttccagtgattctcctgcttcagcctcctgagtagctgggattacaggcacccgccaccaagcccggctaatttatttatttattttttttattttttattttttttaatggagttttgctcctgttgcccaggctggagtgcttcccgggttcaagtgattctcctgcctcagtctccccagtagttgggattacaggcacccgccaccacacccggctaattttttgtatttttaatagagatgggggtttcaccatgtcagccaggctgttctcgaactcctgacctcaagtgatccacctgcctcggcctttcaaagtgctggaatggcaggcgtgagccaccgcgaccagcccaatttttgtatttttagtagagacggggtttcgccatgttgaccaggctggtccagaactcctgacctcaggtgatccacccgcctcagtctcccaaagtgctgagattacaggcatgagccaccatgcccagccgatttacctgttgattataacttttgtaattgtttaatgtcatctatatcttattaaaatgtattccttcaatttcatttttgagttagaactggtggcccctaacacacactctatgaatgcattaaatattaagatatagctgcaggtctaacaaccctgctgctttggaagtagtgacgaatatatgtgatacttgcagatgtctctctaactgcaatgcaatgtaaacacatctggatttctatcggtgacaaagccaggcacttctattaccaatgtggttcattgcctccactcataatggcagcaaatgctagtttcagttagaggttagtacaaataaagatgtgattctccgcccccggtttcgaagctcacagaccccagaataagatcccctgctatagtcctcgcagtaccagggttcaccagtggagtcggagtcgtggctttagaaacgcatgatgaatcttcattcattcaccacccaggccttgccaccactgggtgccatgccctttccactgggtgccatgccctttccactgggtgccatgccctttcctgtgttcagcagctcgagttgcctcctgggcagcagtcaagacagcttatcactctgctcctagcacttgggcttcagggagcccctggcttggttttcttcctgcgtcaccactgattcttgtctcctttgctgggcccccatttccctttttgcctcatagatctcagcagcatctgtactgtttttttttttttgttttttttttttttgagaccaagtcttgctcttgtcccccaggctggagtgcaatggtgcgatctcggctcactgcaacctctgcctcctgggttcaagcgattctcctgcctctgcctcccaagtagctgggattacaggcacccaccaccacgcttggctaatttttgtatttttagtagagatggggtttcaccatgttggccaggctggtcttgaactcctgacctcaggtgatccacctgcctcagtctcccaaagtgctgggattacaggcgtgagccaccgtgcccggccttttttttttgagacatagtctcgctctgttgcccagcccaggctggagtgcagtggtgtgatcataactcattgcagcctcaaactgggcttaagcagtcctcctgcctcagcctcctgagtagctaggactacaggtgtgcatgacacccagctaattttttaaaattttttgtagagaccaggtctcgttatgttgcccagactggttttgaagtcctcggttcaagcgatcctcccgtctcagcctgccaaagtgctaggattatagacatgagccactgtgccaggcagcatctacattcttgtgatactgaaaacattcatggtgagtccagatctctccgtctgaactggagactcaggaatcccactgctgctccaccagactgtgaaccctctgtccccaccagctcccacctgggccagccctcactggctgggatgacagctacagcttcctctgctgtcccagcttctgccctgttccctacagacttcccccataacaccctcccctccaagccccaggacccaggtaacaatggaatcagaccaggcagctggagtccgtcccttgcccactctgcctttatcctcccgggctgccaggcccccctgctgtgccacatgccccaccctgcccagactcccagtccctcagacacacccctgattgactcggcccctgctcagtgcttccctgctgccaccccataggaaagagcccccccacaaccctctccagtggtattattcccacagctgtcactctcaccaccacctaggtctgcttgcttacactctgctcctcccgcccccaccaccaaaattcgagctctaggagggcagaggcttcttcgttgactgaacgaacagcactggggctccggaaactctcagaccagctgagcgactgtgctcagcgagggggcaagagcgcagccgggccagactccccccattcccccattcagcctctagaggggacaaggaggcagctctcacctggcggaaggtgtactcagccacttggtagaagaggcgcagcagcacagggtccccactgtcactgtaacccatgaggaaggcaatcatggcttcactgtgtggccaccagagcttcatggcccactccagctgaggggagagcaggggcaggcatctcagcaggaaactcccctccgcaactttccagacctggctgcgtctccattggcccaagctactggaggtgaattgcgggacatctttggaagttctgaaggacccctcccagtgatatcagcttcctgacctgtagattcttgaatagacaccagggccccagacgaatggcatatatgtctgagcatcagcgtttcgccagctccctggtggcctccatatgacatggtgtcagaggtgtgtaaaccagagcaactccatcttaaacaggagctgggtcaaatgaggctgagacctactgggctgcattcccagacggctgaggcattctaagtcgcaggatgagatatgaggtcggcacaaaatacaggtcataaagaccttgctgataaaacaggttgcagtaaaggagccggccaaaacccaccaaaaccaaggtggcgacaacagtgacctctgctcgtcctcacttccaacagtttacaaatgccatggcaacgtcaggaagttaccctatatggtctaaaaaggggaggcatgaataatccaccccttgtttagcatatcatcaagaaataagcataaaaatgggcaaccagccgggtgcggtggctcacgcctataatcccagcactttgggaggctgaggcgggcggatcacctgaggtcgggagttcgagaccagcctgaccaacatggagaaaccccgtctctactaaaaatacaaaattagccaggcatggtggcccatgcctgtaatcctagctactcgggaggctagggcaggagaatcgcttgaacccgggaagcagaggttgtggtgagccgagatggcgccattgcactccagcctgggcagcaagagcaaaactccacctcaaaaaaaaaaaaaaaaaaaaaaaaaaaggcaaccagcagccctcagggctgctctgcctatggagtaaccattcttttattcctttactttcttaataaacttgctttcactttgcattgcggactcgccctgaattctttcttgggcaagatccaagaaccctccctcttctggggtctggatcacgacccctttcctgtaacactggcacagaagctgagagcaggcctctaggttccaatccagccccaggttaccctctagagaagcaaccacctccctgggcagaaagccttagaacagcgtgggtcacacatggccctgggcgctctcccacctgggtggggcagaagttatcagcatcctggaagtaaaagaggcctccgtggtcagggtcccatccggagtggaagggcaacaataggaacttgtcaatcacgtgggctcgaagttcggggtcgcctttccgaatgcaatgacggagcagaaaccagccggcttccagcgtgtggcctggtgaggggtggagtacggaagggcggggggcggggggtggggttgagggagggaacagagggagcaaaagcccctggcacctctctgctccctccctaacaatgagcgaggctctgagctccctggccctggaagcctgctcctctgcagaaacccccagccttgggaagcccatcctcgctcctctgcctcctcaaggcgcccccgccaggcactcccatatctgaagcccagaacacaaggctcagcgctcccctcctcctgggtggcccccagcccaccccgcccctcacctgggttctgctgtctccccaggcagccaggaagttccttgccaccctctgacacattctccagcacagcttgtccatccctctaccgggaaggagcagaagggaatgttgcctccagccctttcacccacccagccacccaactagaaagacccagctccggaaagcccttcctccctccctcttacccaagcccctggacctgctggcttgggtgggccaggctcagaggggcatttaaggaggggctgattcactcccttgggcctagcaagttgttgttttttttttttttttttttttttagacagagtcttgctctgtcacccaggctaaagtgcagtggccgcaatctcgactcactacaatctccacctcctgggttcatgcgattctcctgcctcagcctccctagaggctgggattacaggcatgcaccaccatgcccagctaatttttgtatttttagtagagacggggtttcactatattggccaggctggtctccaactcctgacctcaggtgatccgcccgcctcagcctcccaaactgctgggattacaggcacgagccaccgcgtccagcccgggcctaggaagatgtaatcctcacttctggcctgatcctctccagcaggggagggtgaaacattgaatggggacagacagggcgggtttcacggcccagaggcctggaagggacttgggtggggcaggaggggtctccttctgtcagggcttgcctggggctccgcatcctccctccagccctcaggccctccaccttccccaggtggggacatccccgaatctctgtctctccaggtgtgtcgagccccagggtgcccaggggagtgggggagtggaaggcctcccaccaccccagctccccaggcatcccccacctgcacgtgctgcagaatcctccgggcgcaccagtcccccagctctgcgtatttgcccgccagctcctcatctgcctccccgagctgctccaccaggttcagtagcatcatgggcaccgccatgggctccgcagccggggccccctggagctggggccggcccagtcccgacgcgtcctcctgcacccagtggacgatctgatccatcatctccaccgcttccgtctgggggtgcaggaggcaaggggaggcccaggctgaggctacatcctgtgccatccccctggacacggccctggggtgggagagccaattcctctcctgaacccagagacaccttcatccagggcctacttggggcctggcacccagcgtccagtaggggccagtcagatccgccccactctgctcccagtctgggggtgcagccccttccaggctgtggggtcagggtctggcagcacagggagcccagggaggagggaagggccttttcccagttgggggcagggcgtggatagggccctctccgtctgcgcccctgtgggggtaggggagcgttcagaggtgaaggggacttggcccacagatgggtccatgggaggggacttgcgtagtgagtgggaatgcatcaggtggccatggcagggtcgcagggtggggtcttcaggggcaccctcctctcacacacctggtaccgcacttcccctgtggctctccacagctcgttcatggccatggtgtagaaacactcactgaagatggttcgctgcaccttgaccgggcggccgtcccgagtcagcacaaaggcacacttcttgccaggaggtgccacccgggcataccgcagcaagaactcaccacctggaggttggggggttggcatgccaggggtaaggccaggacgccccgcacacaccacccttgagcctccccaagtccttcgctgcttctagatccctctaggaactccgcacatgtgccctgttgagtaaacatggacggagtcactgggagatgggcaggaagggggcacctacctgcttttgctgcgtccagaagctgagcatggcggaagcgctcgaaagtgcggtacaggcgacaatacatccatacctgcggggtacgggagggaaagtggcttaagtggccggctggggtgaggtggggagacctttgaggcgatgggccgtgtgcctgagcttccaggctgggaacaccatacctgcctcccctgcagccacacatacttgaggtcatcatacacccgcccctcgcggccaaggcacgtgaagaagcccctgtgggaaggcagggttagcaaagtctggaacgggccttgccagcccctcctgcccctctggggccagcaaatctgtgaggtgcctgagagtgagaaggggcctcaggaagggcaaaaaccctgctgaggactccagaagcacgccgagtacccgtgctcctggtcgtgggagtgctccatccagaaagccaccacgcggtccagctcctgccccacgcgctccttccaggcctgcagagtctctcgctctttctccatgtcctaggggaaatggggcttgaaggcgcagcccccacatgggacctaggcccccccagcctcgggaaccagccctcagggatctccccacctctgcacggggcttcagacgtcaccatccccgggaccctccaagacagcactccccccaagcaccccaccactggcctgtcgcgctgggagacccttgctcatccctcctgctcctctaggaagccagacagagttggtcgcggtcccgtgactgtcactcagctgacacagccgcgcccggctcaccctccccctcctcttcagggttccgctgggcctggggcggggctttgaggcccccgcacttgttcctgccgcgaccctccactcgaatgggccagtccctccagggcccctgctgggagctctggtctcaagatcctgcttggtgggaaaagctgggatggccggagggtctgggatgagggggaacggggctgccacccaccccgccctacaccaggggccccggcagggcggctgagggccttggccctaccaagcctgtggggcaggggtgcagcaggacagggaacagctagtgggcctgaatgcagaggtccctctgacctgtcaccacacagggtagacaggaggcaagttctgtttttgttgttgttgttgttgtttgtttctttgttttttgagacagtgtcctgtcgcccaggcagctcactgcagccttgacctgccaggctcaagcgatcctcccacctcagcctcctgagtaggtgggaccacaggtgtgggccaccatgcctggctaatttttgtatttttagtggagacagggttttgcaatgttgcccaggctggtctcgaactcctaagctcaagcgatcctcctgcgtcagcctcccaaagtgctgggattacaggcgtgagccaccgcacccagcctagcaagtcctctcttttgaatcagtttgtcaccaactacctcaacagtcagtaatgggcagccattggcgctaattttttttttttttttcccaagatggggtcttgctctgtcgcccaggctggagtgcagtggcatgatcttggctcactataacctccgcttcccgggtttaagcaattctcctgcctcggcctctggagtagctgggattacaggtgcctgccaccatgcctagctaattttttttttttttttttttttttttttagtagacggtttttcaccatgttggccaggctggtctcaaattcttgacctcgtgatccacctgcctcggcctcccaaagtgttggtattacaggtgtgagccaccgcgctcggccttggcactgacttctttacacaagtgacacagctctaaggccagacagtaactgcaggtaacagcccacaccccccttctctgggcctgttttccagctgcccagatctgtctgtagctctatgactgacccgatgatgctacaaggcagctgggctgaggtggttcctaccttccaggccaacagtgcacaaaatgggttccagcctctgggcgtgggtactgcactgctggtctttgatgccacagtggctgtctcagtccctgctgcaggctgacccacccaaccccaaacagttcccctttggggtgcttggtaatgaggctgatgccctggcagctggggaggcatcctctgtgtgctcccacccaccctcggcctcggctcatgctcaggggatgagctttgtgcccagccgggctgtatctacctgccctgctcacaggcctgtcatgttcacattcatgtccagcctccctcctgcctccccagactgagtggtgccctcagacggaaacgcggtattttcagataaacaccagaggcatgactgatgtggcccttgccttgtggagtgtgatgcagccgcggtgagacaagtgagctgaaggaatgcggagggtgggtagccccacaggtgccagctacagaagtggggtaggaagaagccttgtaccacccccaccaggcgaagcgcccacaacgccatttgccaaaggtatggcaaatccgcaaggcccctcggttctggggccagccccatgtggcccctggcctccaccagccccagccatgactcctaccgctctgctctgaaggacactttcccacccctctccttgggcctctgcgaggctaggctccaaggcaggtcacagttggtgcggtgggtaagacagagccatggctcctggtgtcaagccctggccagtctgcttccccccacccccacatgacacagcagaccccacaggacagaggcttcccagaagaggtcgcattcgacagggccttgcacacacacccatgccacaggtggagacacggaggctttggttactccaggagcttctggtagcggagtgcctgggtgctctgagaggaaggctgggcagtagaggtgtgtaggggaaacaaaggcaggcggcaggggcttggagggggcggggaatgcaggtgcgccaggagcaccaggccccagaagcagggtgtcactcccctcagacccgcctaggcctgtgctgctccggccaccttgccccggagctttctgggcctcctggtacaaattcagcccacgggatcccagctgtcctaccgacccagctgctaggtggtcagtctggatcacaagctcttgcttcttcccttgggggcatggctcacatttaagaggaagccagaggaagggatccacctctgcagtacccgtggtgtacttgactcagcccacctccccccaacccacccaaggaggctgccgctggtgacctgccaggcccttgccccatcctatcctctagtgcaggaggggagggagggagatctgggccccagacacaggaagtcagcagcagctgcccaaggggctctttggcccttgccctgcaaggcagctaccaagcaacctgctggaccctggtccgacttggtccaaagaccggaggccacagcagaggcctcactctggggccttctacgctttcaccagagctcaggtctccctccagggggctcccgtgagcctcgggcaggtctcagccttcccgctcaggcttcctgagaggatgccgggacacagtgagacacctagtggttatttcaaaaaaagtcttttaattgttcaaaatagcacaaaacgacatcgcactatggtaatattgagtcacaggggttactctacaatagtgaacggtgtactctcctcagaaacaaatcaataggcgcgcgagagaagggatggggtaaaacaacaggaccaggtgagtgggctccaaggtgactaaacgtgacattttccacagcgaaatatactataatacaacaaaccagaggccctggaggacacaggctgctgcgtctccaggcagaggtcggtaggggagggctggaaagattggctgctcggttcaaatccttctgacttgctggcaagccttgctcctcgacagaagtttggggtggggggcagaaaactccaagcagatcccccagcctcggagcctggcctgagttccatgctgcacagctgctgctggtggcctgctccattgccctagcctcccttgtgggtgacactacacagtcaccctcccaagctgcctccaaggacgcctggttcccctccattctccaccctttccatgacgatttgggggaggtggagcagtggctgcggaaaccagcagccctgtttgggaggcggtgccggtggtgctcagggagggggcatggggagagctggaaatccaggacaaggaggccccagccctccctcaagctcccctaggctcgaccctatagatgcggagtgatcgcccatgaggaatgagctgtccttcctttgttccagcggcctgaggacaggcaaaagggcagagggcaggggccagcaacaggaagttgggctgggtggcaaacagcaggcccctcgtggcagatttcacacctctcctgccctggctggccccagcttttcctccagaaagatccctgccaagaattagccaagaagaaaaaagtaaaaaaacaaaaacaaaacaaaacaaaacaaaaaaaagagaaaagaaaaaagattacacattctgtacacagctaacaacaacaaaaaagggacaaaaccccacacgctaaaattacaatgaaagtgtgaacttcaccaattgcaacctaaaaaacacaacaaatgcagcagttggcagtgcggcctgcagggaggtctgcacaggcgctgcccaggccgccgcggggctccttgccccttttttctttttccttcttttcttttttaaaatgggaaagaagagggggagggtagaagaggtgggagcacaaaggcctctgagaaaatgtgtaagcttcctgtggggtcactgagcagggtgggccgggggagcctgaggaagggaagttaggtgactggaaacacaaggggaagaaaagaaaacagaaccagacacccaggccagggtgccaggaaagccactctggggagggccaagagggacgcctttcctcccctccatgcctgcccccgacctggccctcaggaacgcacagccttgggagggcggagctggctgtcctcagctccgccttccctccccgcaaaagtctctccccagggtgggcggcagcggggaggaaaggaagcgcgctcctctctctgctttcccatctgcctctgcttcctcccaacagcaatggtaaaatgtgctttctttagattattttaaaaacagagagaaagagaaaggggagaggagtgaacagcggctcgcgagggtgaagtgcgaatgctgggacggggtgggaggggtgggccctggcgggtgttcctgaagcaggggggtctggagaagaatccaggggctagtcagcttcctctcactgaccatcggccttagatttctttggagcagatttccttggaaggcagaaaaaggaaagagaaagttagtgtgggccctgcaccactggaggccctgctggtgcagggccggttaggggcccccagtcatttgacaagaggctgaacccagctatttccacccctagtctcagaaggttcccgagaggggcttcctgcttacatttctggagaggacatgggccgcttgttggctggcttggtgccagagctgtctttactggtttctggaaggaacgggagagatgcgtgagcagcattgtgacagaacgagagcaaggaacacatgcgccctgcccgcctgcagagtctcttggtgccacatggcatgacccgcagctggcaagggtggggcgcctgccctatgggtggtcaccttttacgccactccttgggaccagaacacgacaccactcactcccctctggacgtaggttagaaacccactcagctcagctcccacctctcactgccctcccaggtcccagagccccaggggagctggagcaggagcatgacctgacaggaggcaggctggcctccatccctcacctgctgcactccagggacctgggacgtgctgttttcgggcctggaaacctacactttcccgccagccctctcactgcttgtcccctcaaacatcctggggtggcgtcccctgcacccccaggcccggagctgggtcccctgctctacttgatggccacccccgtggggggctgtgtgcgcgccaaaggaagcagggagacgccgcacatgggaaaaaatctcagatggtgacagttcctcctgctgcacccggcttcctgggccttccctgtgcctgaagagctccacgaaggacactcaccctgcagccacctcacttgtgtggccgggccatagcccttctcattgcgggcggcgatgcggaagatgatggcgggcttggtggtgtagtcgatgtgggcgttggaaaggctggaggactgcaccaggcaggaggggctgggcccgcagtacacccgcatgaaggccagctgggccggggtggagctcttgagctcgcccccagcctgtgagctctggatggccaggtacacggagtactcgataatcttgccggaggtcacagagggtggctcccaggtgaggtgagcaccatccggactctagaagccagggggtcagaaggtcaacagaacaggctagaggcttccagaactgactaatcatggttcccataagccattttctaacacagtagagatattccatgtggtagttcaaggagcttcaaagagatcttcccccaagtggaaggactaagacaaactgggactcaaaacctagctctcctatgcccccccccggccacctcatgtgctgaggcaggcagaaaccaaccagggacagacggccaccccacagcaagactcactttgctgattttaatggcacaaggggcccctgggaaaccaggcaggcacgtcttaaaggctgagatttcgctgaagggcccccggccacaggcattgattccggcaacacgaaacttataggctgtgcctggctgcagctcctgcttcttcagctggttatagtcagggacggtgcccaaatcatcctaggaaaagaggagtggcatgaacgccactgtggagaaggcagctctgggccaccccaggaacactgcaggtccatggtaactatgggccagagggaaaagaggtcagcggtggctggcccctcacggcaaggagggacgtggcgaggctgactgtggcccggtactggcgggaaggaaccaaagctctccttttctactgcttcaggggggatggtctctgcccaccttcctcaggcttcctggctactcagcttggcccaaagatggaggagtttcctgtaagccccgctcagggtggtggagccaagacccacccacctgaggacatcagcacctggggacacttacgtctgatgggacagcatcatctggtggcaggaaatagtgtgtcaccattacattggtgcccttaatgactcccacatcaaaccactggttttccttcttcatgggggctttgctgggtgggggcggcaggtctggcttctgcaagacagaatcggtgcgacgagatcaggccctcagcacctagaggcagtgctgccccccaggccacggactcaggagccccaacacacccgactcaccacacccagggactcgatgccattggccacttcggtcagggtagctgcagcctgcagcttggctgggctggccaccacaaccggctggggggccacaaatgtgttggatggagccaggcctaggaagaaagaaggtgtcagcgggaaagactcgggaaacctggctcccaagtgagaccgagcctcccgtcctgccctcacctccctgggtgcccccaccaccccagcaccaattcgccctcagtcgcttactctcagtggccgttgagggcagcagcgccacagtgctggggaccgtgccggccagctcattgaggcaattgctctcaatggctgggtcgttgagactgtcggcaggggccagggcctcagtggggaggtggtgatgctgctgctgggcctgggcctcctgcagctgctgctgctgcaccagggcagccagctcctgctgtgtcagcacaatgggtatggtggtggcctggccctcctgaccctcggccgacaggtgccccagctccgcctgagtcacggttgctgctgcctcggaggtgtccatgggctcgccggtgcctgctccagggtcgagagaaacactacttactaggaaggctggccagaagcgggcagcccgggcggaggcccccaaagcctgtcctagagaccccgtccacctcctaccgtgctccactgtaggctaagccctggccgaggggccctgcctgtttcccaggcgctaaccccagccagcctgttctacacggcagtctctactacttggcctgcctggggtcccctgtgctcgtcctccccatcacatctggctcatgccaccctcgagggaaatgggctcctcttcccaggctgtctccgcggcctattgctcccccgagcggcccggcttccccagggttgcaccggcactcacccatgacggcctgctgcgcggcctggagcaccgcctggatggccagggcctgggcttcctccgtggctgcggcctgggcagctgcttctgcagcagccgtcactgccagctcctcgggggtgagccccgttaccatgagggtggtggtgccagcttgggcctcggccattagctcttggggaagtgataactggtctacttcggactgtgtgggtgggggtggctggaccaccacagtggccaccaccgcagagccggcagactcctggcccgaagatggctcccctgtgctgctcagatccacggcggccgggagctcaggggtctgggaggctgacaggacctcggcggactcccccatcagggctgtggaagccgactgcagaagctgccgtggcggcagctgctggcgaggacctggcgacacctggagttcctctgggggctgcaggatgtcaacagcagagaagggcatgtcagaagtttctgtgttggctatggtcactgttattttggccgggatggggacttcagtagtcagagcccttggggcagtctcagtcattgatgagatcttctagaaagggagagaagcccctgtcagaggggaggagaggggccagagccaggcagcagggctgagaagcaagccagccctcacctttccttgtgggcctaagttttcattcttgatgggccagctccagcccatgttaaatagggaggggacagtggttctctgaccagcatgaggagaaaggcccttgagacccccggtcaggtttaacccgtcctcagtcaccctggcctggacaaatgggcactcagacccccgccatgtcttatacaggctgcggtgaagtgacacgcgatgagaaccagtcccagaaataaaagcgccccagagatgcgggggacggtgaggctcctgcctcctgccgcagcaggcaccgaggctgcccttttatggtccggaaaagggaccaggagcggccccatgcctggtacaagagcgacatctggcgtctgagtgtggaactgcacgggcgtaggccgggaaggcggggaagaacacggccccctgggctcttaccggcacagaggggcccgggaccggtgtggactgcgtcacggtggtcacagcccgcgtcagtgtggaggacacggttgtcgtgatggcactggagctggtgatgttcacgctgtcgccctgggtgctctccacctctccctgatcgctggcagcaggtggggggtctgtgggggcgacaggcaggcggctgctcagcaggagcccccccggcctgtacttggcttgaccaccacaggcttcctctaccaccaaggggagggccagataaggcaggacaggctcctggagacctctgtctgcttcaggtacagccaggacgccccagctctccccactggtaaattgggtgccaaggagcctgactggtggactctggacggacccccgccatcgttgtcttggcctttcagcctggggggctgggagaccatgaaagccaggctggccaccttcacttaccttggtttgaactcatgttggaagtgacagtggtggccgtgtgagtggtgcccgtctcgtgggtctcacagggggggttggagcacaccctctgtgttgggaaaggagccagcagcgcggtgccagcctggggggtgacgctgggtgccgccgccacctctaggccagactccacggtcctgtgggaagaagtggcgtcgggaagcagggcacccacgctgaccgacatggtggtgccagtggaagtggtctggtgtgtctcacaggggcgaccagcagggggctgctgcccaccctcgggctggcccgtgcccccgtttgaagtagcggtggtggccgtgtgggtggtgcccgtctcgtgggtctcgcatggcgggttggagcacaccctctgggcgctgcctgcattcgaggtagtggcggtgttggtggtgcctgtctcgtgggtctcacatggtgggttggagcagacttgggtcacggtggccgaggggcacagcagtgcctccagggctgtcacagtcactgtggtgctgggcgagccaccctggaggctctcgcacacaggtgccatgcggggctccccagcacccacgctggaacgggtcatggcagcggtgctgaccgcatggctgtggcgccccgcaggaaggtccttaatgcttgggctgctcagcctgactttgctgctcagaggggccaactgcacaaaagcagggctgcggcccccgggctcccgtgccatgctcggcccaaggagtgggccggccgagcacggggccccggtggccatcacagtcatggtggtgctggtcgcgctggtctggcgggtttggcactgggacttagagccctgggctgcctccagcgccccagtggccacactgatccggatcacggcaggggtgccagctgcacaggcccgacgggcatctcgctggtggttggcgccgacgctcgacatggctgtagtggcagtgttggtggtgcccgtctcgtgggtctcgcagggtgggtttgagcagccatgctgcccggccatgttggaggtggcggtggtggcggtgttggtggtgcccgtctcgtgggtctcgcagggcgggttcgaacagactcggaccacgctaccattctgctggcccacagtcgaggtcacaagagaagcagctgcctcctgtctgtcacagacgaactgcacttgggtgggctgggggtgtcccccaaggttagccacaacagtagtggtggccgtgttggtggtgccagtctcgtgggtctcacagggtgggttggagcacaccaaggtgacagtgccaggctgcacatcaccctggcctgagtcggcgatggtaactgtggcggtgggctgttctgtagtcggggaggccagaatggacacagggaggtcatgcacaggctgggcctccaccccactaggtgccgtgatcagagttacctgggtgggctgggacacgggctggggagacacacgaggaggagagttagtgctgcagctggctgtctgcctgtccctcccactgtcctgcactgtcaccacacaggctgggaccactgaccacttctcaacggccctggcagacgtaagacccactcacccctgcccccaagacactgacttgctcagaggccagggaagaggcaccactttgcctcaaaggcaactgggatgaggaagaggctgtgaggacagggcaaggggaaggcaggaggctggctgaagtcaagtcctttgtcagagaatggaaatccccctcaatgctcaaaggccaacaacaaacgtttcaccgttttccttaatatgtatgaacagaacactgcacacacatgcagacgagctgcggcgtcctgtagaacactgcgagaggaagaacccggtgttcaaacaccaggcatggccaaaccatgacagccaaaccacggactatgacacagggaccatgtgacaccagggaaaatgccccaggtgaggaaaggcctgccatggctgcacccggcagcagcgcaacaccaggaaggaaaggcctgtggacggacggcgtgagcctcacgtgcttccacttgtgtggggtccctcgcccacacgtggcctcaggccctgccctacctgcatggtgatggttggggttgtgagcccgcctgccgctgtcagcgtggtctgtgcggccgacacagtgatggcagtggggttgatcacctggcttgagagggtggcaatggtgcccaaggtggtgatgggcgtggccagggaagcactagtgctgtggccccccgccccggcaaggctggtggagacggtgcctgtcactgtgcctagggtcgtgacacctgaaggaaaggaggcaagagttgggccaaggctgctgctgtctccttcccagcagctcctcctgcacaggctggggcactctggagctgcttgcatagaaggctcgggagagaggagctgctgtgccacccagctgtgccatggggattgaaggccagccctgcttcgttataatctaggggtggcaggggacctggcctatgggtacacacctgtggtgcctttcacaaccaacgtggtgacggctggcttgacggcggagacggtgacgggtgtgaccaggcgaacaccccccatgggcacagtgcggaggatggtgcctggctgtcccggggcccccttaagcaccacctggaacaccagaggaaagtgccaccaacgtcaccaccaggctggtagatgccaccgatgctgcccctcccaggcctgtcgggaggacctgcgtggcgtgctggggtggactgcactaggacactgggctgagagacggctgggagtgcctcacctgggtcactccctgctgcccgtggccagtggcaattttggggacagcagtgatgattttcgcaggtgctccagttcctgaagtcatcaccttggtggtgatgatggtgatgggggacttgatgccaggactgctggtcacacctggatgggagagtggggcccaggggagacaggctctgtgagggctgcccctgctgcccctagactataatgaacatccacaagtcacagccatagccctgcccatctcctcactacccttagacacaaaaggcagcaaggagaagatagaaaagggtaaactaaacagaaacacagcacgccttataacccggactccatttcccctccagtgaggacttgcagacactcatatgtcgggggaggcccctacccgtggcgcccgcctgggtgatgatggccgacatggggatggttttgatgatggtggtcgtgccgggcttggtggtactgggggagacgctgctgatgcccaggatggtgggcttggtccccgccccactggcctgcgtggtagtgatgatggtggtgggcttgccatctgctgaggtcaccagcttcaggattgttcccgctggcaggggccctttggtctgaaagggggaagcaggtgcatgagccggcatcactgccaggaagggaagtgtggtctggctactctccgccggcagccttggcggctcagggaatgttctggaggctgtgggcgaggggagtgagcagcagaacttgctgagccatgtgtgctcatgggatcttccatgggcagggacatgagttcttcctgtggcctggcacccaggcccccactcttgcgtatgtgcaaagactgagagctcacctggatgatctgagtcacaggacccgtggacgcctggcctgtgactgctgaagtctgaactggtttggtctggaccaccgacatcactttgcccagattggaaatctaaaaaggaagggatggagcaaggagtgatctggaaaccaaacaagggcatggcctggctgagactctcctggagctggcccagggcggccattcaccactggcagtggccgtagcctggcagcacccatcactcaccagagcactgcctcctgggacagagatggggctcttcaccagggtgatggtcttggtgaccccgcccacaactgtggtcaccacctgggcttgctgggccactgtcacagtgcctgacttgtgcactgtgatgatagggcgggtagacgtgttggtggcggaggaaaccgatgtccccacctgggcggctgcagtcttcagcatgcgagtggcagggttgctcacctggaggaggcagagacgagtgacaggccaggcaaagaaagcgatggggaaaccacccaagatgtccacggtgggcccatagctcctgcctcaacactcaccttcctcctcctcctgctcccaagcccaagaacagcttggttcccccttcctttaacaggcaagggaggaggctgagcctgcagctctcacctgaggccatgacgcccctaatggagacagcttattctgcagcccacggtccaacggctaactctaaagcccggagggaatgactatgcttgtttgaccacagtgacaagccccggaagacgctcaccatgactggcgaggaggccaccttcacagtggctgggagggtggtagtgccaggtgtcacagccatggtcttcacgatggtggtacccgctgggacactcagcaccgtgggtgccgaggaaggggggatcttctgggtggcagcggccgcagcggccagtgcggccatcccactcatctgtgggctactgccaatcacctgcagcaggcacgggcatgtgaggccaggtcacaggtgccacccacctccctgcttggtggacctcaccggaacctgcccaggggctgccctgctcttgggagcctcatcccgccagcatggctcagctttctctactgccagaccccgctctcctggccccagacacagagggctcccaccacccaccatgcacggcaacccccgtggcaagaggcagctgggagctctggatcctttctaaagaccagagtcaggtcccgttgattctcatgggcctgtggcaagcccagctggctagatcctcctctcaggctgcaggacaagaaagtccacgtggcaaatgctcttaggatcaggcagcaggttaggccttctaggcattaacctattaattcccaccatgacctcgcaggagcgtttccccatctgcacgtcccaggagggaaaggtgtggggtgcgtggtaccagagcccgagagggatgtgaacccctcagtacacttgcaacttaatccactggatcaacaggaaatcccacccgccccagtgaccactcctcaccgttccctgggcactctgtgttggcacaaccatccgcactccggcgggaagggaggtcacggtgacaggggctttcccagcctggctggcaggtcgcatggtgaccaatggagttcctgttgtagcctgaggaccggtcactttgagaacagcagggacacctgatgagagaaggggccagccgtcagccatcaccttctgcacgatgtccccagcccctttgcaggcagccctgagccacttctgttggcctgcttgtgtgggagtctggctcttctctgtgccctgagagtgaccatttccacaggtggggccaggctttagcatccccctacaacccttggagacaagcccaaagctcccggctgctggcctgctgtctaggctgccgtctcgcagcccctacttggccgctgcctctccccggaggctagccccctactttcaaacgtccctggtcccctggctcaccttgagtcctggctgcggtgggcacagaaatggagctgccaggcaccgttggcaagacctggatggtggtggtggtcgggggtgcgggggcagcctggggcaggagcgtgatgcctacttgggtcagcggctgcacagcaggtgcggctgctgctggggcagggctcttgggagggttggcaggcacagatgggaccggattgggtgtaggggaggtggcagtagcagccgtggcaggaatgtcatatttctggagctggagaaggtagctgtcggctgttgccactgccccccagctcacctccagggagttggtgttggcgcgtaccagttgtactcgggctgggggtggtggcttttctgtgggagaacgcagttggtgagaaggggcgggaggctatgggaggaggggagtcggctgggccgggcctacctgtctctaggtaccagaggtccttgcagcagacctggttgttccaggccttgcggtagccgtcacgcccactccaaatgtacaggcgggtgttgatggcgactgcgcagtggccagcccgagcacgggggatgttgtcctccagtgtatccatcaggatggtctcccaggccatggtatctgggggagggcagacaagggaggtcagcaaggaggatggaggaaacccgccacccctggttgcccttggttcttttgttgtcaaggatgggaattaaaatcaagaagttattggattattacattaaaaacaacaaaacaaagaaaccctttgtggcaaaaagcaacacaaaaaataaaattacaaaccaccaacggccaactaagaaaaccatgagaaacacagtcagaggtttacctccttgcccgttaaagaacactacaactcacagaaagagacggcaatgggaaagtggtttagggaaaacgtgatagaaagatcttaagaaaaaacacacactctcacgcaaaagaaatctaaacttcaaccatcggcgcctggcatttttattttcaggcccgcagcagctggggctcaaggtgagccggagggggagcttcggccacccatcaggcttggcaaagagtggcctgaccattccgtgagggcaccactggaggcgcctacgtgggcacagcctctgtgcagggcagttcagccgcatcggacagcaaccctacttctaggttttcacccctaggatacacttgcacacgggtggagatggtgcaaggatactcacggagcggcgcctgtacaagttacagcagcacaaccgcaactcgaaggaggctgctgcggggcagggacgtggagtgatctccaagatacggcggatgagaaaggccaggtgtggcactgcgtgcgccaggctgccactgtttgtttttaaagggacctatggctaatgctcagatatgaagagcccctgcagggtggacaggaaaccacccacatggctgcctctgagaagcagaaccggagaaccgggaggagggaaggaggccctgcaccgtagaggcttttgcacttttggatgttgggccatttggatggagagctcattcaaaaaactcagaggcggaacattgcttcagagagctctgcccactggatccttccagtggattccaaagggagccgggggcccagcttgctccccgcacaccccacacagctcttaggctgagaagggccagcctcctgcagcctcccacaggccactcggagcccgaggaggccatacccaggttgagacaagccagcgtgttggtacacttccactccttctcgtgtgtggccactttgacgtcatccatgacgagaggcacccagccaccaaacacgtacattctgggagtgaggagggaagagtgggaaaggattgtagagttggtgccaagctagaggccacctctgctaccccagttctagagctcagtcctctggctctccccaggagagtccccaaggatgcgtgaagcctcctgacgtggccctctcctgcctggtggctcagccctcaggagaactgtgtcacctctaccacataaaagtgccgttcagctcatctaaagctcaccttcatgtccacagtttctaggttccctttaggacctggacatccacaaagacacccaggtgcttgcacagaggacctagaacactctgtacctgatagggcggagcctcacaggcccggggagggtctcagactcagcttgtgtgtggccctctcccccctgaatctgtctttccttggtcccccagggtcgtaatggaaaaacagggctgccaaatgccagcccagccagaaagaggcatcctcaggccttagggtctgacaggacaaaactgagtgagagcccttcgggggaggggccacgccagtctagagaagagagacgcaggtgagcagccacttacttatttccgatggtggttgccgagtggagactgcgaggaagaggcgccaccccgctgagactgggcttattccacgtcagggtgtctgcagagagacggaggggaaagggttacacaaggtagactgcacacaggtcgttccctggattcaagctagctcaggaaggtaggatctgtctcagtgagagaattccatccctggcttccctatagcctacggcaggccctctgactgttgtcatggtagctagattcctgtgttacccaggcggtttcgaccaggctagcaatagcgctccttcaggtacatcctgagcacctgccctgagccaggactgcactctgtgctgggggaggagtggtgggcacaccccgaactctccatgaaatacgttcaccgccataaccaccttaggctacagacattttggcaaactgttggaaaattctctcacgggaaactgcttctttggagtgccgactctgatctataggacaacatcgccatctcctctctcccagctgaagaggcctccggagatccacagttagtaatctttcccagccactcctgataccaccacctggtgaccggcccaagcagtccccgaaggcctcacggtttaccggcatccaatggtaccacagcagtcagaccaggatgcagcactccacacagtctgaccactgacgagtcaagagggactaatgctacccggatccagagaattccattctagaaagccttaatgacttattctcttataagcccgcagaccaattcagcccactcagccagcacagggcagagataacagccccaaacctagggacgatccagggttccccaccctggcccaccatgacaagaggaaagcacgaagtggtatgctccagctccctaagagccccacctcaccatacaacagcgccacccacggggccagccaagaggcagacccgctttgtcccatggctgctggggtgctaccaccctgctcaccaatatctagggtccacaggtcccccagcctgcagccactcatcccgccgtagatcaccagcttggacttcttattgtctttttcggtgtagaccacggcagtatgtgactcccggggtggtggtaggaccccgtaagtgatgggaatgtcccaggctaccactccagagcctggccgtaattccaggatatataagtcattcaggtacctgacgaggaaagatcagttacggcaagtctcgactcctcacgccagaggcttcgctggatggctatcagtgagtggcagcctccccagaacacaaaggggctagggctgtgggagctctgaagttcttctaccctagctcttgaggaaggggctgccagaagctccctaggatgagtccaactggaacaggggacacagggtgggtgaggctgcacagcagccccgagtccagacccagcagcaggcccccgccatgcacacaaagctgggtattatatgagggctccgcagagcaagagggggcgctggcttgggactacctccagacagagagtccttggccacgggccttggaaaatacccatcaggaaacttgtaggcagcggaggctgagaaggaacgcgagcagctctaagccgactccgagagctgggccagcccaaggcaaagtggcttccacctccagcttggccctcctcccacgaggcctgctcagggtcagtagcgattttggagcccgaaagctcctgagagggcatccggtgccgctctctcatttacaacccagcacgagaaagggacccggccacggggctctgctgcgcacattctttaggacaccatggagccctgtgcatgtgagagcacacccacccggggggttccagagaaaaggaccaagcctcaccttggaatgttgttctttgggtcctcgctatcattggccagacccccaaacaggtagcatttgttgcccacaagggagaagctgtgcccgagtcgaggacacggagggggcccgtttttgggcgtctttgctttgagtctcttccactcccaccggctcgcctgcaaaatcaagacctggagactgaaccgtgggatgagaaggccaccactagggacccggggcaacttgtggtggaggaggaaatggccgggggtgagcgaggtgccttgctggagcaagaaggtcctgggtgttggtccttgctgccttcttctgaggtgggccaagttcagagcagccttggcagactctcaagcgtcccttccacctcccgcttgcctcaaccctgaagccactaccgtcaggtcacatggggccaaggaggcagagtgagaacctggggctgctttacctggagttcgtagaggtcattgctgtatttcccatactccaccatcccaccaaacaccaggaggcgagtcccgtcacacacgaagccataggctgcacacccagggggaatgtcccccctcacggctgggatgaaccactggttggttgctggggaacagaaggaggcagaagtcagaacacccgggagcccccattcctctcattccccaaatgtgccagccgtcaagcttggtgagaggggctgagccagcaccatccctgcgggcgctctagcaactccagctgcgctacctgggccatcttccaaacccctcgacttcaggccagtgcaaaagagcctgtgaccaccctgcttctcgccaaggtcatcttaatgagcgggaagttactgtgcaagatccctcatcagctactgggaatctagccactgccttccttccctagcactcagtgatcagacatgaatttctccccaaaataccctcttggtgggcctgtgctcctcctccctggagcccacatttttgtcccttcatcacagggtcaggacagccagagcccagagcagcactttcaagtggccaaaacagtgaccgctgcaggctacgaagagccatggggatgagacccggcctctgctctgacctcccggacttcctctggtctcctaggtgatggtccaccagcatccctccctgcccctgctgccacacctatggtactccagaacattcttgcaagccagaggcagcagtctcagcagagctgtgacagaagcttctcaaaagctcatgagggtgaggcgaccaccaagaaagagggaaatcagaccttaggcactgctttgcttccacaggatggcacagcagccttcagctgggaccaggcccctccctcatgtcctcaaacttgactcccctcacacctggcaggccagggcttccccgaaaacctcctcctatgaggggtccctcagaggattcaccacactctttccagaaaccccaaactgggggccaggtgcaaccccgactctgtgcctctgagctggcctgggtgagatctcagcaagcagacggcagaaggaactgaggcccctccacatgactcaagacgcaagatgggtcccccaggacgtgacagggcatggggggattcctgtggggtgggaaggcttccacacagggatgctgtgatattgtgatataatacagactattcagtttggtggccaaaagtgttgtgagaccatagaagaggaaaaacagtgttttttttccatattcaggtgtgcacccagggccaggcggctgaccatggttgggaatgcatgccccactgcactctggtcccacccagtctcacactgtcacccccagggctcaatgcggaaccgtgtgcaaggctagcccttatccaaagcacaactcccagcctgggtagcacagggagaccccgtctctacaaataattttaaaacactggctcagtgtggtggcatacacttgtggtcctagctactcaggaggctgaggcgggaggactgcctgaccctcagagtttgaggctgcagtgagctgagaccgcaccactgcatcccggcctgggcaacagagcaagacctaacctcaaaacaaacaaacaaacaaaaaaaacagaaaaccccacacagcacaactgtaccaccaccgctcctcctgaggcgagagcacccccaccccgctctccagcacccactctgcgggtaggcttcgagcaggctgacagcctctgcagccattcagctgagtcactgggcctcggacatgccgagcactagagctcccctgccatttccctaaagcagagggacaacacctgtgccgcccgcatgtgcaagctcggatcctggccctctgcctctttctcattcccagtgcaaaaaccaccccagaaaagcaagagctgccaaggccaacagccttgcgcactggagagccgtcctgaccaatccctggagggagctccatgcaagctaccagggtaaacgcataacgagacctaaggctgcctgggccaactgctctcggtaggtaaaggggcagagcccaggagggcaagcgacacctgaggtcacagcgtaaaacagagacagagacaacagccccatcactgacttgaagcaaccgatctgtgccttccctagggtcccatgtccaggcagccaccctcactcccctgagcaccctcgtggtcaaagcccacagctatggggctgcgggtcagagtttgggacaaagctaaatggcacgtggggtcagtgggcagctttcctatcacacgctgatcagtgagccggtgggccaggccagaagcgccctgtgatatctttggggatcccgctcaccagatccttctacaggacccaagaggtgctgatctcattctagaacactccaggcagggcaggggccctccccacccccgtcaagagaggtctgtcagggagcacagctcctggtgtgacgacaaacctgcggctcctcatctcacccacgagtcctggttccgccccctgaaagcacacgagcaagctctcctcccttctcccagcttttcaatgtgacagctgctctcagtcacccctgaatcatctggggggtgtcatgtaacccaatccttgggcccctcatcctggaaatgctggctctcagctgggaggggaaggtggggaaaggaccctgcactagatgaagaccactccagctcccctctcctgagcaaggctgtgccccggcctctctgtgtttcatcagctcccccaaccacttcatgctctgcaagctccatccctggttgccactgtcccatcaccacctagagactggtgcccatgcagtgaggtggccggtcaagttcaacgagctgccttcctctctgttctacctgtcacattagagcatttcctgtgtggcatacgacgtgctgggaggcacagaggacaccgatcttgtgctcatactcccaatggggtaggaaggctgcatgcccccctcccacgatgagacaaacaccctagaagagctctgaccaagccgggcccttgggagcacagagcagtgcgactgctggagaggggaggacaggagtggaaagggcttctcagaagaggtgacgtttcagccgggccttgaagggtgaacaggatttcccgacaaatgaaactagcagggccaatcaggaagtgactgcaagagtctagtaagaggagaggagggcttggtgtggaaggggacacatttgatgcctgcccaacgcaatgaacaattagatacagggacagaggagagaatggaggcatttcaaaggtgatgggccccaaagacaggtggcagaacggcctctatgaaggtttgcactcccgcccaactccgccaccagctgggagggcgaccctggacctgtcacttcccctcttggaccccaatttcctcatctgcagaaacaaggaagtagttccactaggtattttccaaggctccctccagctccaagaacctatggacattacagagccaccgtagccaaagctctcgctcccccaccccccacacctggcagcactctgaatcctttggcttgccacatggaactaaaattccctaaggacaagcacagtagctaccctaagagctctcaaagcacacaccccctgaagctttcttatcctagcaacgggaaccccttccagatcagctctctccaaaggtacaaggctttttgaggactgatcccgcagaactgcaaggggcacaggcgtgagaatatgccctgatctcatcccaaacacaacaaaagaagacaagacaaaggtgacgaggccgggctggcgggagggggcagaaaccccggtgaggaagagggcttcaggtctgccagctgctctctcgtctgaggaattgccgatgacagtttccaaactgctaccctggaggatcccagagcttcattttaagcagccctttggaaggcaggctacccctctaatgcacaacctgtctttgcagactggtaatgaattcatgccaaagtggtcaattcattttaataaactaatgaatatgcagaggccccaggaagccaaggcagcagtggtggtggactctggagccgactgtaattaggcccctgccctactttctaaaattgcatttccctgccagggagcctgctccaggccttatgagaagaaagtcggtccacagagtggagaaggtgctgctcatggtgacggtgcctctataaacagccccaccactggagaagccttagcttactgagctaattcctgctactgcagctgcctgggctggcgcggggcaccaccaaccaccaagcgcccccgcccgggggctgctgagaaaggccctgctccctggaggcaacaggtgctgagagacctggaacgaaaaacggtcacagacaacccaccagcctttcaaagtcaacgtggtaggtggcgataatctccgagatgtggagaaaccagcactttctgccttggggggtggggaaggaagcggcacccaagagcccagctccagccttcccaactccctaaaccaactttctccctccaggcagctccagcttcccacccccagagcatcgaggcactggagctcagccaaagaacagcagcctctcaccgctcaggacacaaagcccactcagcgagggtttgtctgcagggccaccaccgaggccaggggatcgctagagcccccaggagagaacggccgcggagcaaggggttagtgctgggagccgtgcctgccactcaggactagggcatcccaaggccctcccccagccgcctgcagggggcttttccctcacccagactcttccagctcttgcctgggaccgaactcaccctgaccctgccttctgggcaaggccagggtcctgtgggccaacgggcagtcagtaggcaacttgggaactgacccttgtgctaggggcacaaaacgggccaagtagccaccaagaaaaaggatgccacaaagctgtcgtggacagcagcaggctttctgccctagagactaagcaaggctactaggcagaggcaacaacaaacggcccccacgaaggccgtggtgcatcagccatacctgaagagagaggttcctccccttcccaactaacgggctttgggttttgcagggaggcagaagagcgggtggggtaaccccctggatccgcagaagcggggagacacacgactacgcaggccgctgaggggtaactggaattcagcttgtaaaccagaaggcaccagattaggagaaggggcgacttggaaagaaatgctgcagaagtaaacgtggaaagggagaggcggccctgccgccggcccgtcctaggggtccccaaggctccggcattacccgggtcggcggatgttaaactctgcgtcctaagagcgcttcccttccctccctttttcgagagacagagaacgaatctgtaatctagaaatggtcatttctccagaatgggcactcgagatgagggagagctgagcaggcgcaggagaagggagggagggagggaggggagctctgcctgcgccaaggggacacatccgcccgccccagccccagccccagcccgctgggtaacggtgtgggtctgaagtcaccaccgctggcgacagcccctctccctcaccagtcggactaggggctttcttttaactaacgaaaaccaatcctcaaacacgggagagacaagggaacggggagaagatcagagaaaagcactgaagcccggcacagcaaaggggaggggcaagccgatcagtggggagggagggggaggaggggagaagggggagggggacggggagaggggagaaggacgggtaagggaggaggggagagagagagggaagggtagagggtgagggaggagatggagggagggaggagagggagggagcagatggagggagggaggaaagaggagggagagggaggagatggagggagggaaagagccgaagacccagcgggctttgcactcacccgtgttgtacacgtgcagttcgtccactattccctcgttgccgccgccaaacaccacgatgagctccttgatggccacggcgcggtggccgtggcggggccgtggcaccggacccgaccagcccaccactcgcttccagcggggctgcagaagcaccgctggcaagttggcgggcgacacggccgaagccatagttccgggaaagggtgcggtggggagaagtcaacaagcgggaagggagcccctcaattcctttcacacaccccctttcgtctaaggcagctctcacggagaagcggtttctcacacagcggtagacgactccatggaggccgccatcttaactgccctccttccctttggctcttccctttcttctcgctcaccccgtctccgcaagagccgcccgaaactgtcgagcgcctaggctcaagaagctggaggccgctgagtcccgtcgccccgactacttgtccgggcgctcccgcttacaagctcgggcgggaggccctgggagccgccatcttgagccgcctctctctcctcccttcctcagtcgtagccctcccccgccggaaatggcggagccccggcccggttcccacacccccaagtccccagcactggccggcttccggggcgggtggaaaggagccacaagcgccgcggtcgtcgcagccccgccggcgctcagaccacaattgtgggagccgccatcttgagaccgtcccgcttccccgcccagcgccttagtgcagccgccgctcccgaaacagcctcgacacacctaacgaatggaggcgggccggaggccggtggaaccagctcgagctctcgagggccgtttgggggctcgcgccgtacggcttgtgaagtctcgcgcctctccccttagtccgcctctgctgctcaggctgcgcctgccgccgtgggagccgccatcttgagactagctccccgttcccccctattctcttcctcctaggtcagttcttccactgcacaccaaactcaaggcggtgtccgatcctcacttcccgccttatgactccttcccacaggagccgcttcaaagagctagagttaggccccgaagcggcaactgtacggcagaagaagcggtaacggcagggcgctcatgcctcctccctgggagccgccatcttgtgtgaagaagtaacaactaaacatggcggcagcggcgccggcggtcgggcgaggaggcggagccgggtgacgtcaccgcttccccccactcgccctcgcaccgcttcgcccctgggcccaagcctcttaaaggacccctgcgctgcctcgcggcgggggtgggggtcggcgctgccgcgcgctgggctaaagctcgagtcgcgctcagatcaggtgcaggcgcaggcgcgccccgccccacggcccccccaccgggcgagcctccacgcctccgccctgggagccgccatcttgccacttcccctcgcccggccgtccgcgggcgtcaatagcgactttcagcacaaaacaaagatggcggcggcggcatctcggaaatgcccggatgagactgctaacccctccgacgcgctcggccccgcccccttgggaacggtctctcgggttgataagggacgcacgcccgaagaactgcctttaaccagcactggggacagcggcacgcaggtggccggggttggcgaacagccactgcagccgcgcctgcggccgggaagcgagcattttcgcgccctgcacacccagcagccgcaggaggcggcccgaggcgcgccgcgggggagccgggggcggggcgacagtgggaggcgacgcagccgagcgccggcgcccgggggtggagcctccgcccgctcccaggctcccaggctgcggggcccgccctcgggcgccaccgcctccgcccgcgccgcagcaaaatgagccgggccgcgcgccccagaccgccgcgcgctcggccgcccccactgccgagaggcccgcagtcgggccggtggcgcacgagccgggcgggcgaccgcgggaggcgtccgcgtcatctcgcgtcacctcgccccgcccgcttcccaggcttcgagtcccgccctgcgcgcaggcgcaccggcgctgctcggatcctcccttttcggagatttgaatttcccccagcgaggcgagtgaggcgaaatacccgtatggtgatagctggccttttcgcgccaatactgtaagtgctcaccgcagccctgggaggtgggtcccggcctcgcccccacgtttcgcctcctctaggaggccgcccgggcgcggcggcggcggcggcggcggcggcatccgccctgccacgcgcaggccgcagcgcggggacccaagctgctgcccgggagcggcagtcgccagtagaaatggacagaccggtcctgtcagagcctgtggcttttgttgtaaacgtctagaagttcagttaaattacaagatctaccagatctaccggcgggcagaattattactttgaagttactgaagttatgcgtcctgctggaagaccttgtaatttaatgcgttagtaaagaagcacacgtcaccctctcacacattttcaacaatatttttaaagtcgcctctcaacatattacatgtattttgtaatcgtctgtgttttagttcatgcagttggaagtatccatttgagaagggacaaagagaagaattcttgcctgtctgtgccaccacctgctctttgtgaccttggctagttacctcacatatgtccccaagtcccccacccatggtaaataagaaaactaaggcctgatgcgttggctcatgcctgtaatcccaacactttggaaggctgaggtgggaggattgcttgagcctagccggggcaacatagcgagacccggaggcatggtggcacacgcctgtggtcccaggtacttggaacgctgaggtgggaggatggcttgagccagggagttcagggctgcagtgagctgagatcgcgccactgctccagcctgggcgacagagcaagaccctgtctcaaaaacacacacacacacacacacacacacaaaagcagctgctggtttccaagggccttgcctggaatcagtccagaagctaaattaatgttaattgatattcctttatccacagaaagacagcaagaaaggtcatgcggagcgggggacataactaaccataaatgctaaaggcctggaggtgacagtgcctgctgtttaaacgcgtgcgggagagtctggggcctttagccaggagattgtcaggcttcccagggcttccctgaaagaccccagacccaggggccagtgctgttgaggtgttggctttcccatgccaggcgctgggggaagctgtgacgagatttgagtgtcacataataaggatcatggcaattcaaaggtacagggaagctaggctataaggtaaccagctcggttttcctgggggtcttggacaggtgctttgattacatggtcactgtcagcccgtacccccggtcagatagactgaacccctgcagccggaaagaggagttgctttccatgcccttcctggagttcttcctcgatcaagttgacagtgtttgactcttgttccagctctccgccctgcttgctggcaggcaggagggtcagactagcatgggtgccatggggccctaggtgggtgcagggaaggacctgtagacgccatgcggggcctcagctggtgtctcagctggagtcaggagctgaacggggaagtgcctgagaggaaatgacagctgagtcaagggcaatggccaggcgaagtgggcaaagggcttccaggacagagctgggcctgaggagctcacagggctggatggggatggcactttaagtctggccaagactttgggacatgatccaggacatggaatgggaagctggtcatggaagggtggaaagccagggcagacatgatcccatccagggctgctcaaagatgctggggctgcggtgtgcacacccctggacccagaggcttttttgactgggaggacggggcaggaggagttcgggtgccccatgctgagatggcaggcttgtgtgaagcaaggacgtatggagtgatagtgaggactgtggttcctgtgtggcaacaccatgcttcagagggcaatggggcacccacatgccaagcctggtggccctcctcagcaacggaactccaaggcaagaaggctgagaatgaggcccaggaggatgcggtgggccccaggacctgcttgagaagtgaaatagcaaacaggactggtaaaagggagcagaggtgctggctttgttctttaatataattgaattgaaattgagcagggcttcactgggcatctgaggaagagcaaggaatcagaccctgtcccacccatttggggcctaaattgcagtagggcagatggacattgcacctcaaaaataaacagtgcttgtcacatgaatcatttgcaaatattttctcctatattgtctcttcattgttgattgcttctgtgctgtgcaaaagctttttactttaatatactcccatttgtctgtttttgtttttgttgcctgtgattttggggtcttagccataaaatctttcctggagcatttccccattttcttctagtagttttattttatttattttattatttgtatttatttatttatttattttttgagacacagtctcactctgaaacccaggctggagtgcagtggcacaatcttggctcactgcaaccttagcctcctgggatcaagcgattctcctgccacaccctcacaagtagctgggattacaggcgcatgccaccaccctggctaatttttatacttttagtagagatggggtttcaccatgttggacaggctgggctggaactcctgacctcaggtgatctgcccgcctcagcctcccagtgtgctgggattacaggtgtgagccaccacacccagcctttttttttttttttttttttttttttttttaaagacagagtcttgctctgtcgccccaggctggagtgcagtggtgtgatcttggctcactgcaacctcctcctcttgggttcaagcatttctcctgccccagccccctgagtaactgggattacagatgtgcgccaccacgcccggctactttttgtatttttagtagagacggggttgcactgtgttggccaggctggtctagaactcctgaccttaagtgatctgcccgcctcaacctcccagtgtgctgggattacaggtgtgagccaccgcgctggcctcttctagtagctttatagtttcaggtcttacttttaagtctttaatccatgttgagttgattactgtgtgtggtgagagataggggcctagttttcattcttcttcacatacttatccaattttcccagtgccatttattgaagagaccatcctttccccaatgtaggttcttcgtgcctttgtactacttataatagctaagatatggaagcaatctaagtgtccaccagtggattgatatgtaaagaaaatgtggtatagatacatgatggaatattattgagccatttaaaaataaactgttggcgggcgcggtgtttcaagcctgtaatcccagtactttgggaggccaagacggccagatcacctgagatcaggagttcgagaccagcctggccaacatggcgaaaccccatctctaccaaaaatacaagaattagccaggtgtggtggcaggcgcctataatcccagctacttgggaggctgaggcaggagaattgcttgaacctgggagacgcaggctgtggtgagccgagattgtgccactgcactccagcctgggtgacagagcgagaccctgtctcaaaaaaaaccaaaaccaactataaaaaataaaaaaaataaaaaactattggctgggtgcagtaactcacgcctgtaatcccagcactttgggaggccaaggtgagagggtcgcttgagcctaggagtttgagaccagtctgggcaacatagcaagaccctgtctttcaaaaaaaatttaaaaatttgccaggcatggtaacatgcctgtggtcccatttacctgggaggctgaagtgagaggaccacttgagcctgggaggtggaggctgcagtgagctgcaatcacaccactgcactcagcctgggagacagaacgagaccctgtctcaaagaaataaacaaactaataagataaatcttgttatttgtggcaacatggatgagcctagaggacgttatgttaagtgaaataagccaggaacagaaagataaatattgtatgtgttaattcttatgtaaaatatttaaaaaatcaagctcatggaaatagaagcatagtgggtattagaagctggaaagattagagagtagggaaagattcggaggagtcggataacaaatacaaaatgccagcttcatagcatgaatggatcctgctgttctgcactgtagggtgagcactgttaactacaatttcttgtgtattttcaaaagactataagaaaggatttggaatgttcccaacacaaagaaatgataaatgttccaggtgatggatatgctaattaccttgtttgatcattatacattatatacatgtatcaaaatgtcactctatatgctattaaaaataataaaataggctgggcacagtggttcacgcctgtaatcccggcactttgggaggctgagggggacagatcagttgaggtcaggagttcaataccaccccagccgatatggcaaaatcccatctctactaaaatacaaaaattagccgggcgtgatggcccgcctgtacttccagctactcgggaggctgaggcaggagaatcgcttgaacccgggaggcggaggttgcagtgagccgagatcctgccactgtaccccagcctgccccacagagcgagactctgtcccaaaaaataaataaaataggccaggtgtggtggctcacgcctgtcatcccagcactttgggaggccgaggcgggcggatcacttgaggtcaggagttggagaccagcctggccaacatggtgaaaccctgtctctactaaaaaaaatacaaaaaattagctgtgcatggtggcgggcgcctgtaatcccagctactcaggaggctgaggcaggagaatctcttgaaaacgggaggcagaggttgcagtgaggcaagatcacaccactccagcctggacaacagtgcagacagtgcaagattccgtctcaataaaaaaataaaataggccaggcacggtggctcatgcctgtaatcccagcactttgggaggccgaagcaggtagatcacgaggtcaggagttgaagaccagcctgaccaagatggtgaaaccccgtctctactaaaaatacaaaaattagccgggctaattttagttgtaatcccagctactcaggaggctgaggcaggagaatcactcaaaccccggagggagaggttgtactgagccgagaccacgccactgcactccagcctgggcgacagagcaagagtctgtctcaaaaaaacaaaataaaatgaagtaataataaaatagtgctaagtggtctgcatatacagatactttttttttttttgagacggagtctcattctgtcgcccaggctggagtgcagtggcacgatcttggctcactgcaacctccgcctcccaggtttgagcgattctcctgcctcagcctcccaagtagctggaactacaggcatgagccatcacgcctggctaatttttgtattttagtagagatggggtttcaccatattggccagggtggtcttgaactcttgacctcaactgatccacccacctcagccacccagagtgctgggattacagacgtgagccaccacgcctggccactttttttttttttttttttttttttgggggggagagggagtttcgctcttgttgcccaggctggagtgcagtggcgtgatctcggctcactgcaacctccgcctcccgggctcaagcgattctcctgcctcagcctcccgagtagctgggattataggcatgtgccaccacacctggctaattttttgttttgttttgttttgttttgttttgttttgttttgttttgtttttctgagatgaagtctcactctgccgcccaggctggagtgcaatggcacgatcttggctcactgcaacctctgcctcctgggttcaagcaattctcccgtctcagcctcccaagtagctgggattacaggcgtgcgccaccacgcctggttaatttttttgtatttttgtagagacagggtttcaccatgttggccagactggtctggaactcctgacctcaagtgatccacccgcctctgcctcccaaagtgttgggattataggcgtgagccaccgtgcccggcctaatttttttgtatttttggtagagacggggtttcaccacattggctaggctggtctcaaactcctgacctcagatgatccacctgcctcggcctcccaaagtgctaggattataggtgtgagccactgcgcctagcttttttttttttagagatagggtcttgctctgtggcccatagctcactgcagcctccatctcctgggctcaagtgatcttcctgcctcagcctcctgaggagctgggactataggtgcaccaccatgcctggctaatttttattttattttttaaatttaattttatgtattttgtgtagagacagggtctcactttgttgcccaggctggtctcaaactcctggactcaagcagtcctctcaccttggccttccaaattgctgggattacagatgtgagccaccatgcccagctacatatgctttttgatgtataacagggtaatgtccagataaacccatcataagtcgaaaatataggaactggactttcaacttaagaggggtttagctgggtgcagtggctcactcctgtaatctcaggactttgggaggccaaggcaggaggatcacttgaggccaagagttcgagaccaggctgggcaacatggtgagaccctgtctctacaatttttttttttttttttttttagatggagtcgcgctctgtcgcccaggttggagtgcagtggcgcgatctcagctcactgcaagctccgcctccagggttcacgccattctcctgcctcagcctcccgagtagctgggacaacaggcgcccaccaccacgcctggctattttttgtattgttttagtagagacggggtttcaccgtgttagccaggatgctctcgatctcctgacctcgtgatccacccgccttggcctcccaaagtgctgggattacaggcatgagccaccatgcctggcccaaaatttttttaacaaaaattagcagggcaggccgggcgctgtggtagggaggctgaggtaggagaatggcgtgaacccgggagatggagcttgcagtgagccaagatcgcaccactgcactccagcctgggcaacagagcaagactccgtctcaaaaaaaaaaaaaaaaattagcagggcaaggtggtggtatatccctggtcccaactacttgggaggctgaggcaggaggatagcttgggcccaggaggtggaggctgcagtgagctgtgattgtgccactgcaccccagcctgggcaacagagcaagacccccgtgtctaaataaaaatacccaggccatggcagcagaaagcaaggaagaagccacgtggaagccctcctggcgcttcttccagggaggtgagcagagagcacctggggccaggaggcggcatgcctgggtttctgctcctcctcactgtaactttcagccaagtcaaactgctagagtttcagtttctttatctgtgaaatgccggggctggcacagatggtttctaagatccctcccaggcctggaacttctaagcgattaggtcaaaggtgagctaaccgggctgggcacagtggctcatacctgtgaatcccagcactttgggaggctgaggcgggtggatcacttgaggtcaggagttcaagaccagcctggccaacgtggtgaaaccccaactctactaaaaatagaaaagttagccgggcatggtggtacacgcctctaatcaccgctactagggaggctgaggcaggagaatcacctgaacctgggaggcggaggttgcagtgagccaagattgtgccactgcactctagcctgggcaacagagtgagactccgtctcaaaaaaaaaaaaaaaggtgcacaaaccgaggcccaagacagttaaggtgcaagatcacatggttagtaagtgggagagccaaggtttgaacagtctggcatcagctgaccaggaactggagcccacccttctctctccctgagcccgcctacccgcccaccctcttgagtgcgaaatttattaatatggaagggagaagagctttaatgattggagtcattttcagagcattaaagctcttctcccttccatattaatgtatttctcagctactagggctcacttacagcaccagtggccccaaagcagttgacagtcagtggtaattaaattgtctctctggttctgtgactgaaggagacagaaggctttatggtggcctgaggaaagaaggtgatttggggcttggcacttcaggagagggcaggcgagtgagccagggaagctggcctgggaagcctgcgggtcacccccttgcctcccggcctggtgcttgagtggcagacggtgaatcctcctcctcctccatcccccaccttgtgtcagaggccagagctcggactccatctaatggtctctagttcagctgggtatttggtgaaaagggctttggggctggagacgtccacttttataacacactgacatgggaaggcgcattctgagttgtaatgacagagctagacaggtcttgtctgtagatgcagtggctttaaggaaactaggacgatgggcaggattttcctaggtgccaggagaaaggggtgatagaggattctagaggcttgagagagtcagtgtgcagcggtttcactctgatttgcttctccagtgaagatggttggtagctcctgaggccgggggtcaggaacatggaggcggtgctggggacggtttgttttctaaccacactccttttgtaaccacaaaggaaaaaggcagaacgttcctccgctggcgccagccaatcagcaggactcctgccttccttcggggcaaggtcgcagcatctgcctcggaaatcacgaaatcacggggcttctttctgctggctcagccgggaggcccagagtgttctgcagaggctgcgtattgaaggctgctctctgaagctccctgccccaggtcacgccgccggttccagatgaatccagagtgggggcaggccttcgtgcacgtggccgtggccggtggcctctgtgccgtggctgtgttcacgggcattttcgacagtgtttccgtgcaagtgggctatgagcactacgccgaggcgcccgtggccggcctccctgccttcctggccatgccgttcaactcactcgtgaacatggcctacacgctgctggggctgtcgtggctgcacaggggcggcgcgatggggctgggtccccgctacctgaaggacgtgttcgcagccatggccctgctctatggccccgtgcagtggctgcgcctgtggacgcagtggcgccgtgccgcggtgctggaccagtggctcacactgcccatctttgcatggcccgtggcctggtgcctctacctagaccgcggctggcggccctggctgttcctctctcttgagtgcgtctccctggccagttatggcctcgctctgctgcatccccagggcttcgaggtcgcactgggtgctcacgtggtggccgctgtggggcaggcgctgcgcacccacaggcactatggcagcaccacctcggctacctacttagctttgggggtgctctcttgcctgggctttgtggtcctcaagctgtgtgaccatcagctcgcacggtggcgtctcttccagtgcctcacaggccacttctggtccaaggtctgtgacgtgctccagttccactttgcgtttttgtttctgacgcatttcaacactcacccaagattccatccctctggcgggaagacgcgttgaacccagggaagaacctgctgaaaaccgatgacccccagcattgaaatggactctgagatggcagcgtggtgccagtgtcagacatcctgtgtgtgatgatatgcactgatcacacaagactgccctttcctgagaagctgcgggcttcggtgtggaggggtggagtgctgtgatctcgacaacttactttcaaagacataaagcacagatctccgcacaggggatgtgtgtgttcctgatgtaatttgcataacttttctgtagtttgaaatgtttccaaataaatattggcaaggggagtggaaatgacaccaagaagcccctcatgctcatggttggacagagagcgatcgtctggagtatctttggggtgtcagctctgggtgtggactggcagcagtgaggcaggccagtcagtggggtaccagtgagtgtccttagaggcggctggattcagggagactgagtcacactaaatacgtgcccagcagactgatggggaaatcactcaattatccccatgacatctgtgactgttaactgtaggcaggtcacgtgagagccacatcacctcagatcgtctgtggaaccaggcagtgtgcatccagatgaggaaacacacaaatgtcaaaagttgaactctcaacagaaagttgctttgtgggtctcccctcagagccagggtgtggcttagatgcccttagtggctacagtctgagcagtccccacctgcccgtcacccaggtccttgcgaaccagtctgctgacagtatcgtcaggcactgtgctggaggcggcacgtgcttctcatgcaggcaacagtttttgagccctcgagcccaaggcccagactctctagtttgtggtcaggatgctgggtcattcttagccgcagccagagaggcactgaggactccgtgccaccctctctactcccgggacagtccttcctgccggtcactatgttacttagaggcctgcctcacctcctttcatctgaaggcatctggtctgtaaaggggacttccttttttcgagacagagtcttgctctgttgcccaggctggagtgcaatggtgtgatcttggctcactgcaacctctgcctcccgggttcaagcgattctcctgcctcagctgcctgagtagctgggattacaggcacccaccaccacgcccggctaatttttgtatttttagtagagacggggtttcatcatgttggccaggctagtctctaactcctgacctcaggtgatccgcccgcttcggcctcccagtgctgggattacaggcatgagctcccgcgcccggcctgtaaaggggactcctgaagacaggtaatgtcatttaactcaggggctcttcatcccagactccatagtcttgtccctggagccttaagtactaaggagggtctgctttaagcccacaaattaaatggagaagtgaccagctccaaaggtgagggcagaggagagaggatgccctgtccctgccaaatggcatctcagcatgggccacccatgtgcacctgctcagtgccctcgaggttggcattcggcccacgactgtgatgactgagatgtttctggaactgggcacctgggctggatgttctgtcctggctggctgagcacattgccaccaggtaaggacctggggcaaatggcaggacccgacccagggcttggggcctgggggtggggcacgtggttggcaggggagagcaaggacagcacctgcttgggaaacagcctggttccatttgaggtcgtctcgaaagcaccatgtgccctagaagagggaagaggctgcacacatcaccagagaggccacccttacttcacagaggctggagggagggcgaaaagaaggcgggcttccatgcgggctcagagacagggtgggggcaggctcttcatccagcagtgggggatccccttttgtgatttctctgtgagtagctgtttccctcattgacagaggactgctgggacttcatgccacacctcgcagcaacaagcactcatcacgattttactttttcttcctaccaatacctgtgtaataaacagccctgcgagcctcctgggtcaggcggggtcccacgggaaacaggtggtgtgcctagattggggtgattcagggcggttttgtgggacacctggaagagtggaccccacccaaaggagaggcttatgtggaggggacacctccagaggggcagggactgcaggaagcctggctccgctccctccctctcctgccagagttgccagattatacgccaggcgatgaacaatggttttgcacaagcgtgtctcaaatgttgcatgagacatttctcctactaaaaaagtattgtttacctgaaattcagatttcactgggtgttctgattgttatttgctaaatccaacaaccacgtcctgagccaacacaagcagagccagaagccccggaacctgcgcaaggcagagcaggtggcaaagaaggctccaggcaggccccggcctggaacctgcactccccaggccctttttgaaattagtgtttctccaagtatggccagttgccattagtcacacagcttcctgcatcccttcctgcccaggcgaaccccccttctggggccgggacctcagagtgcctcagccctggcccggggtttgcggattccaccaacccctgagccactggaggaaggaggctggcggctgtgcctccctccagctctgcagtccacggaggagctcggcctcgcccagggggattggctgtcagggccgccgttgccgttactggtcttggtctcagtctcgctgctccactgcgtccccagcacagctggggagccaatggttgccagatggggcctctccccgacctttgacctaacggtttagaggttccaggcctgggagggatcttagaaaccatctgtgccagccccggcatttcacagataaagaaactgaaactctagcagtttgacttggctgaaagttacagtgaggaggagcagaaacccaggcatgccgcctcctggccccaggtgctctctgctcacctccctggaagaagcgccaggagggcttccacgtggcttcttccttgctttctgctgccatggcctgggtattttctccccacataaaatagttttagggcctggcgctctggctcacgcctgtaatcccagcactttgggaggccaaggcgggtggattatctgaggtcaggagtccgagagcagcctggccaatatagtgaaaccctgtctctactaaaaatacaaaaaattaaccaggcatggtggtgggtgcctataatcccagctactcgggaggctgaggcaggagaatcgcttgaacctgggaggcagaggttgcagtgagccgagatcacgccactgcactccagcctgggcaacaagagcgaaactctgtctcaaaaacaaacaaacacacacacacacaaaaatagttttaagcccggtgcagtggctcacgcctgtaatcccagcactttgggaggctgaggcgggtggatcacctgaagtcatgagttcaagaccagcctggcgaacatgacaaaaccccatctctactaaaaatacaaaaattagctgggcatggtggtgggagcctgtaatcccagctacttgggaggctgaggcaggagaatcgcttaaatccgggaggtggaggttgcagtgagctgagatcgtgccattgcaccccagcctgggcaacagagtgagactccatctcaaaaacaacaacaaaaatagttttaggccaggcgcagtggctgatgcctgcaatcccagcactttgggaggctgagaaggaagaattgcttgacctcaggagtttaagaccaccctggacaacgtagggagaccccatctctaccaaaaataaaaaaaattagctgggcttgatggtgtgtatttgtagtctcagctactcaggaggctgaggtggggaggatcacttgaacccaggagatccaggctgcagtgacacagttgtaataagatggcatcactgcactccagcctgggtgacagagcaagaccccatctcaaaaaaacaaaaaaattacagcatagggcacacactatcatgcattcgcttttctgggccccattttggcttggtgacgtgccaaggtctgctagaaactgcacacactggcccggagcaggcccttctccagttaggtctcaggagtgggattgtagggctgaagggaacttcagtttcaaatccctggagtgcttttcccagtgacgttcttgattcacatctctagcagcaatgtgagaggcttctccgccccccaccagcaaatgtcagggtgggtgcattttcatggtgtgccaatctgatgagggtgacatgagatttcattgtgactaactcagaccccttcccctctctcaccgaccccccgccaaaagtagtgtgtgtgcatttttgagacagggtctccctgtgtcccccaggctggagtgcagtggcgcaatcatggttcactgcagccttcaactcccaggctcaagagatcgtcccacctcagcctcccaagtaactgggactatgggcgcaggccaccatccctggctaattcttttgttttgtttttgtttttgtttttttgagatggagttttgctcttgttgcccaggctggagcgcaatggcgcaatcttggctcactgcaacctctgcctcctgggttcaagcgattctcctgtgtcagcctcccgagtagctgggataacaggcatgcgccaccatgtctgactaatttctgtatttgtagcagatacggggtttctccatgttggtcaggctggtcttaaactcccgacctcaggtgatctcacctcggcctcctaaagtgctgggattacaggtgtgagccactgcacccagcctccctggctaattcttaaaaaaaaaaaaaaaaaaaagaaaatttttttttaaaattactatgaaatgtattatttgttattaagttacaaattttttttttttttttttgagacggagtctcgctctgtcgcccaggctggagtgcaatggcgcgatcttggctcactgcaacttccgcctcccaggttcaagcaattctcctgcctcagcttcccaagtagctgggattacagctaaaattagcccggctaatttttttgtatttttagtagagatggggtttcaccatgctggccaggctggtctcgaactgacctcatgatccacccgcctcggcctcccaaagtgctgggattataggcatgagccaccgcgcctggccagagcccagcctaattcttacattttttttctagagatggggtctctctgtgttgcccaggaccacactcctgccttgccctcaaagtgctgggatgacaggcataagccactgtacccaacctcctcattttgtcctcggactcctgggctaaagcaatcctcccaccttggcatcccaaagtgttgggattacaggtgtgaaccactacacccagcctattgtttgtcttctgaagatttatgtggtcatgcatgtctgtctttttcttcgtagctttcggggttggtcttccttaaagcagttttctgagtgtctaggtaacacttgtctgtacctcagctaactttgttaaatctcagcatcgcctgtagctgcttcagatgtttttattataacattttcattataaaattattagatagttaaaaattatgtttataaagaaaacaatgcggctgtcacattgctgacatgacggtttacgtaactatagtgaagtagtgcacttggtgagggagggaaatgccagcacgcttgggcaaggtgcctcattgcagcctgggagaacgaaggtgggtgaggcatttccctcccacgccgaaggcctccgggaatagaaataccgggtaaatatccactggccagttcgtatcctccagtgggtcatcatgtgattggggagcgcttcttcccattcaaaggggatctttggggacccgggtttatggaaccctctctgcgttggtcctgggggctgcttctctgttcagtgaccctgtgactggagggcactgccttggcccggcgcgtggccatcttgttcctagggtcactggagcctgattgctgtggtggcacgccaggtccttcaaagctttcatgtttttattttattattatttcttttctttctttctttctttctttctttctttttttttttttttgagactgagtctcactctgtcgcccaggctggagtgcaatggcgcagtctcagctcactgcaacctccgcctcccatgttcaagcgattctcctgcctcagcctcctgagtagctgggatgacaggcatgagccaccacgcctgccctattttattattattttaaattttattttagtttcgggggtacatgtgcaggttggttccatagacaaattgcatgttgtgtgggttttgtgtacagattatttcatcacccaggtattaaatagtaagcctcatacccaataggtgatttgtttctgtttttctagcctttccttccattgccggcctttcactttgatctttgctgtctgtttctctttggaaccgctgacttctggttttgctcttgcctcttctcggccccacttgacctccactggggcctgggctagcttgtgtgtgccgccaccatctcggccagctcaggtctgtttctttggaagattctgtgcccctcccatgcctctcctgcatgtggcccatgcacagtagtgtgtggctgccctcgcccttgtgtgtgggttttttgttgtgttgttgttgttttgttttgttttgttttgtttttgagatggagtcttgctctgtcacccaggctggagtgcagcggcacaatctcggctcaccgcaacctcctcctcccaggttcaagtgattctcctgcctctgcctcctgagtagctgggattacaggcgtgcaccaccatgcccggctaatttttgtatccttagtagagatgaggtttcagcatgttggccaggctcgtctcgaacccctgaactcagctgacccacccacctcggcctaccacagtgctgggattacaggcctgaggccctgctcccagcctccttgtgtttctctacgtgcacattgtgcagagcctccccacccggctggacgtgaccgatggcacacgtccccagtctcacgctcctgtgcacgcctcttggtgcctatgtgtgagagcttcgcatttcaactcgagtagaatttgccaaatcccttgccagattgggggcagagctcctcaacagcacttgatgtggtcaccggggtgatctgctgatctgacaggagtgagtgacagtttcattttgtccttgtttgcctttttcagcttaaaatcgaggttgcctcaaaacattaaacatagaattcccatagggtccagcagttccactgctgggtataggcacaaaggagttgaaagcaggagcttgaagggatgcaattcacagcacccaagaggtgagagctggccaagtgtccatggatgaatacatagataaacacaatctgctttatccacacaatggaatattattcagccatgaaaaggaagggaatccttacgcaggctaccacatggatgaacctggaggacatcataattagtgaaagaagccaggacagaaagtacctgattccacttttgggagggacctggtgtcgtcagactcagagacacaccacaggatgatggtcgccagggtggggagagtggtggggagttagtcttttttttttttttagacggagtctcgctctgtcgcccaggctggagtgcagtggtgcaatctcggctcaccgcaacttccacctcccgggttcacaccattctcctgcctcagcctcccgagtagtgggactacaggcgcccaccaccacgcccagctaattttttttgtatttttagtacaggtggggttcaccatgttagccaggatggtctggatctcctgacctcgtgaaccacccgcctcggcctcccaaagtgccaggatgacaggtgtgagccaccgcgcctaacctggagttagtcttttttttctttctttctttttctctttctttctttccttccttcttttgtcctttcctttctttcttctttctcttctttcttctttcttctttttctttccttccttccttcttttctttctttctttctttcctttctttcttctttctttgcttccttccttttcttttctttctttcttttcttccttcttttcttctttctttgtttttttctttctcttctttctttccctttcttctttctttccttcctttcttctttctttccttccttcttttccttctttcttttctttccttccttcctttccttctttcttttctttctttcctttcttttcttctttctttcttctttctttctttgcttccttccttcttttcttttctttctttctttcttctttctttcctttcttttcttctttctttctttctttcttctttttttctttctttctttctttttttttttcagagactcactctgtcacccaggctggagtgcaatggttagtgcgatctcagctcagtgcaacctctgcctccccggttcaagcgattctcctgcctcagcctccagagtaactgggactacaggtatgcaccactgtgcccagctaattttttatattttattttattttattttattttatttattttattttattttattttatttttgagatggagttttgctcttgtcgcccaggctggagtgcaatgcacgctattggctcactgcaacctccacctcccaggttcaggtgattctcctgcctccgcctcccgattagctgggactacaggcctgcaccaccatgcccggctaattttgtatttttagcagagacagggtttcaccacgttggccaggctggtctcaaactactgacgtcaagtgatccacccccactcggcctcccaaagtgttgagattacaggcgtgagccaccgcgcctggcctctacttatttatttcttgtagagatggagtctcaccatgttgcccaggctggtcttgaacccctgggctccagtgatcctcctgcctcagcctccccaattgctgggatggcacacatgagccacggggcccagcctcctcattttgtccttaatatctgcttgtaaccacctcaactcagaatacctaccaaaacttagtttggatgtgtttcccaggttgcaatcctcaaatttggcccaaatacactctccttgtattaattttacctcagtgtgttcctttaggtcgacctcataaaatctggtatgggtaattctgcagagccactccctcaccaccgctgtctcgggccatgctggctagcagcgatcgagggcttactgtggacgaaagtcagtttagagaagttgaatggccaagttcacagcagtaggaagtggctgcggtgggctttgccctggggctttggactttgcctggagctgctcctcactcattccaggaagctcttgcaccatgaccgctgtgacttgggatccaaatttcaattgaaaatatatttttttcaatttttttcatttttaaaatttttttagaaactgagtctggctctgtcacccaggctggagtgcagtggtaggatcacagctcactgcagcctcaacctcctgggcttaagtgatcctcccatcccagcctcctgggtagctaggagtataggtgctcaccatcatgctcagctaatttttcttcttttttctttcctttttctttctttctttttttttttttttttttgtagaggcagggtcttgctatgttgtccagttgtcctgggctcaagccatcctcccacctcagcctcccgagttgccaagattacaggccactgtgcctggcccgatgttttttattggggtaaaatacataataacataaaatgtaccatgttaaccagttttgtggttagttagttcagtggtgttacctacattcgtaatatggtgcaaccaacatcatcgtccatctccggaactcttttcatccttctaaactgaaactctatccccattaaatgctaactccccagtccccctcctgcagcccctggaaaccacccttcaggtgtgccacaggtcaaatgtggacacagggaggccactgcacccggccctcagcatctgaacttccacccctgctgcttgaagctctccatctcgccgtccagacaggctgccttccccgctggctctgtataggatgcaaccccaacaggtggagaagctcagcccgcagcacccacacggagccgagatgtgcaggttgccgagccggccccgctgggggggcttctgctgggacagacataacaaacagcagatgtagccccctgccgaggacttcagattgggaattgtcagagattccggagattgtcagattggatggaaacccccacttccagcatatgctgtttactagagacacacctcaaacatatgtccatggaaatattacatgtgaaagaatgaatgctaggcagttactaccaaaagcaagctgccatggctatattaacatcagacaaaataggctttgggacaaaacaaaaacagtttaggaatgatgttaaaataggctctacatatcttaagcaaaagttgacagaactctagggagaaataggcacatgaagcatcgtagagggaggtttcttttttttttcttttttttttttttttttttgagacagagtctggctctgtcgcccagactggagtgcagtggcacaatctgggctcactgcaagctccgcctcacgggtttgagggattctcctgcctcagcctcccaagtagctgggactataggcgcccgccaccacgcccggctaattttttgtatttttagtagagacggggtttcaccgcgttagccaggatggtctcgatctcctgaccttgtgatccgcccgcctcggcctcccaaagtgctgggattagaggcgtgagccaccgtgcccggcttgcagttttcttttttaaaatgtttatttctattttgtgattcaaactgaggatcatcttgctgcaaagaagtttttaagttgataagaaactgctgaacagtgattcaaagtggctgtgccatttcacactcctgctggccgcgtgcgaacctttcatgcactccgcctcctcaccagtgctccctgcgaccagtcttcagtgacagtcattctgggtgcgattttatcttgcatttccccatgagaaatgggcatctcttcctatgcctcagtggggagaaccagagacgggggcagaagaggggcaggagaaggcagggagggtggttggaggagagagcattgggtgggggtggcaagtgctggaggagggggacggggaagtgggccctttgctcttgaaccattttaaccccaagcaaggtgcattcagggtttgggcaggggtctggccctcatgtcaccagatcctgagtgactgtaggggcctctcatcatgtcttcactcctggacttgctggctccaggtgagaagacgtggacactgctgtgggctgcagaggtttgggggtgtgtgtgtgtgtgtgtgtgtgtgcatgtgtgtgtgtgtgtgtgtgtgtgcgtgtgtgcgtgtgtgcatgtgtgcgtgtgtgtgtgtgtgcatgtgtgtgtgtgtgcatgtgtgtgtgtgtgcatgtgtgtgtgtgtgcatgtgtgcatgtgtgcgtgtgtgtgtgtgtgtgtgcatgtgtgtgtgtgtgtgtgtgtgtgtttgagacagggtctcaccctttctcccaggctggaatgcagtggcgcgatctcggctcactgcaccacggacctccgggctcaggtgatcctcccacttcaaccccctgaataactgggactacaggcgcacggccccatgcccagctaattatgtaattatgtcacttttcatagagacggggtctccccatgttgcccaggctggtcaggaactcctgggctcaagcgatccacccgtctcaacctcccaaagtactaggattccaggcctaagccactgtgcctggccttcagggttttaaggaacagtttcatttccacagtggggcggcttgagaagtaggggcaccccaccagcagctgagcagagaagaaatggtggctatcagacagcccaggcctagtgaatcctccagtgaattattcctggcctttaagagacaggtaattccagcgaggcgcagtggctcacgcctgtcatccaagcacttcaggaggccgaggtggacggatcacgagatcaggagatcgagaccatcctggctaacgcggtgaaaccccgtgtctactaaaaacacaaaacattagccgggcgcggtggcgggcgcctgtagtcccagctactggggaggctgaggcaggagaatggagtgaacccgggaggcggagcttgcagtgagccgagatggcgccactgcactccagcctgggcgacagagcgagactccgtctcaaaaaaaaaaaagaggtaattccagggtttcaaagaaagtaaagtttccagatgtgctttatgaagccagaataacctttgtcccccaggagaatgttagtgtcacaaagacagactcttgtgggtcctgcttgcttctccgctctgagtccacagcggtgtctggcacacagtaggtactcctgggtgactcactgaatctggttgcagacttgacacacacacacatgcacacacggaaaagtatcgatactgctgttaaacactggtaggcatttctaaaataaaaacattagctaatatcatccaaaagcagatcaaggcatgaatatccaggctgggcgcggtggctcatgcctgtaatcccagcactgtgggaggctgaggtgggaggattgcttgagcccaggagtttgaggccagcctaggtaacatggtgagtctgtctctaaaaaaaaatacaaaagttaggtggggatggtggtgcgagcctgtggtcctagctactcggaggctgagggagaattgcttgggcctaggagtctgaggctgcggtgagccatgatcacaccactgcactccagcctgggtgacagagggagacctgtgtgaaaggaaaataaatcttggggcccccaaatcactcagctaaagggaaaactcaagctgggaactgcttagggccaacctgcctcccactctattcaaggccactcctctgttcactgagataaatgcttattggattgcttcctttggagaggctcatgagaaactcaaaacaacacaatcattggtctcttatctacccatgacctggaagccccctccccacttcaagttgtccctttctggaccaagccaatgttcatcttacatatgttgactgatgtctcatgtctccctaaaatgtataaaaccaagctgtgctctgaccacctcgggcacatgtcgtcaggaccatcctcaaccttggcaaaacaaactttctaaattcactgagacctctctcagatattcagggttcacacctgactcttaaaaaaagcaaagaagtgaataaactataaccaaatgtacacaacatattgttattaaccatagtcacgatgatgtacaacaaatctcttgaactaattggaattcctcctaattggaattttgaatcccttggccaacatctcctcatccttccctccccacccaccaccctgcagcccctttatgagttcagcttttttattttctacatatcagtgaggttgtgtggtatttgtctttttgtacctggcttatttcatttaacatagtgttccccagtttcacctattttgttgcaaatgacaggatttccttctcttttatggctgaatgggattccgttgtgtacagatatcacactttctttatccattcacccattgataaactcttaggttgattccatctcttacctgttgtgaatagtgctgcaatgaacacgggagtgcaggtatctctttgacatggtgatttcaaatttaaatatatacctttaaatatataccaagtagtgaaattgctggctaatacggtagttgtgtttgtagtttttggactatactgttctccgtactgtctgtgctactttacattcacaccaacagcgtacgaggttcccatttccctgcatccttgtcagcatttgttatttttttaaacatctttttgttaaaagccattttaactggggtgagatgatatctcgtggtgcttttgacttgtgtttccctgatggtgagtgatgtggagcattttttcatagacctgttggccatgtctattcagatcttttgcccactaaaattttctttttttgagacaggacctcactctgtcacccaggctagagtgcggtggcatgaccacagctcatgcagcctcatcctcctgggcccagtcaaccctcccacgtcagcttcctaagtagaaaaaggccagctgtggtggctcacccctgtaatcccagcactttgggaggccgaggcaggtggatcacctgaggtcaggagttcgagaccagcctgaccaacatggtgaaaccctgtctgtagtaaaactgcaaaaattatccgggcgtggtagtgggcacccgtaatcccagctacctgaggctgaggcaggggaatcacttgagcccacggcacgtggatcacctgaggtcaagagtttgagaccagcctggccaacatggtgaaaccccatctctactaaaaacgcaaaaaatgagccaggtgtggtggcgggcccctgtaatcccagctgtctgggaggctgaggcaggagaatcgcttgaacctgggaggcggaggttgccgtaagccaagatggttccactgcactccagcctgggccgcaagagtgaaactccatctcaaaaaaaaaaaaaaaaagtgaaatctgcagagatgacagcttcatgagctgattgtatgaagccacaaacagtactgtgcttaatggtgaaacaccacagcattttcattagtcaagaatgagacaatattcccaggatcaccactgtttcttcccgtttcccaatgttaaattggccaatgcaattgaaaaagttagccggacgtggcgcacaaggaatacgtgttggaaggatgaagcaaagttctcattctttgtaaatcacttgattgcaccactgaaacgtcctctggtctgctgggcaggtttgagtcaggagattctggctgtcttcactgggcctatctgagactgggtgtcatttgctttgctcttgtctgattttactgtcagacatcactcctgtaaccagtctttgtagtaagtctcatttcttgcatgtacttggaagtacatgcaataaatggttttattttcccagcgactgtgcccgcccccaccccattgagttgtgccaaatcccccttaagacgtggggcccgagtccatcatgtttcagtcaggttgcttgtaattagtcttattctggttcttttttcttttcttttctttttctttttttttagacagagtctcgctctgttgccaggctggagtgcagtggcacaaactcggctcactgcaacctctgcctcccgggttcaagtgattctcctgcctcagcctcccaaatagctgggactacaggcttgcaccaccacacccagctaatttttgtatttttagtagagacggggtttcaccatgttggccaggatggtcttgatctcttgaccttgtgatctgcccgcttcagccttccaaagtgttgggattacaggcatgagccaacacgcccggcctggttgtcttttcttttctttctttttttttttttttttttttttttaagacagggtctcactctgtcacccaggctggagtgcactgatgagatctagactcactgcagcctcaacttcctgggcttaagcgatcctcccacctcagcctcccgagaagctgggactacaggcgtgcaccaccacgcctggctaatttttgtatttttagtagagacagggtttcttcatgttggccaggttggtctcaaactcctgacctcagctgatccacctgcctcggcctcccaaagtgctgggattacaggcatgagccacgactcccggcctacccttaattttttttttttgaagtgcacaagctaattttttaattactatttgtagagattaggtctccctgtgttgcccaggttggtcttgaactcctgagctcacgcaatccatctaccttggcctcccacaatgctggactgcaggtgtgcaccacgctctggcatcattctggttcttaaacccaagggtacttattttccaacatgaaccttaacctcacccttccagaaacttctcaggcatgggcaaggttgcagtctcccttactgcaggcagcaatgactttagcaacaggtgatcttggtgggctcgtaggggagtgggaatgggcagtggcttttgtcctccttttgttgtccgctggggatcttggttgggaagcctgaacccagcattgtttcctagccctgtgttcaacaatgccgggagcgaggtgccttcctatccccgtgataaacagttctgggacctgttgctctgccacacaatcctgagaactagcacaagtcaattcgcttgcaggaccaacacacccatgctcctgaaagatgagactcgcagagcccggcccgagactgcacccagccgtccaaggctgaccatgcttcccacccggccctccccacgccggctcggacttcgggcattttctctcctcctttcctccctggtgatctgaggccggctctgtcgggggagtgttcttcctctttgcagtgagtccaataaactcagctttgcctgaacaacaggtttttctggtggtgattttggggagtctacagccaacagctgaaattgggaaaacggggcgggggtggggaatccctttttgttttttgtttttattttttacagtaaagtgaaagcaagtttattaggaagatagaggaataaaagaatggctgctccatagacagggcagctgggaatcccttttagcacctggtggctgcagatgggtagaaatacagaccatatttggttcttagtttaattagccagagacgcagaacagggtgggaagccagacggccacacctagcacctcatcaggctgcagccaaccagggcctctcggggctgggaaaactcgattcttgctgtacttgggcttactcggctctccatcttatgcaaacacctctccttatgaaaggcaagaagaatttgttctacactggggatgggttgtgcctgtcacatggagcagcctggggacctagagggaccctttagaagcttagcacctagcaattccttttcacatgtgactcatggtctattcagttttagtacttcttttttttttgacagagttttgctctgtcacccaggctggagtgcaatggcgcgatctctgctcaccgcaacctctgcctcccaggttcaagtgattctcctgcctcagcctcccaagtagctgggattacgggcacgcgccaccacgcctggctaatgttgtatttttagtagagacggggtttctccacgttggtcaggctggtcttgaactcccaacctcaggtagtccccctgcctcggcctctcaaagtgctgggattaaaggcgtgagccaccacgcccggcttttttttttttttttttgagatggagtcttgctctgtcgcccaggctggagtgcagtggcaccatctcagctccctgcaacctccgcctcttgggttcaagcaattctctgcttcaccctcccacgtagctgggattacaggtgcccaccaccatgcccggctaatttttggatttttagtagtgacggggtttcaccatcttggccaggctggtcttgaactcctgacctcgtgatccatggcgcctggcctactacttctttattcatttattttttgagacggagtctcgctctgtcacccatgctggagtgcagtggcacgatctcggctcattgcaacctccacctcccgggttcagcttcccggatagctgggactacaggtgcgcgccaccacgcccagctaatattttgtattttgtaagtagagacgtggtttcaccgtgttggccagggtggtctcaaactcttgacctcaagtgatctgcctgcctcggcctcccaaagtgctgggattacaggcgtgagccactgtgcttggcgcagttttactacttcttgagacaactctgaagatttctatttttcacagaaagtcattcagttaatctagacttttcaaatgtattgccataaagttatatttactattttaaaattttaatttcctccttaacccaacatttatttaaaagggtcatttcagccgggcgtggtggctcacgcctgtaatcccagcactttgggaggtcgaggcaggtggatcacctgaggtcaggagtttgagaccagcctgggcaacatagtgagaccccatctctacagaaaaataaaaaattagccgggcgtggtggcacacatctgtagtcccagctcctcgggaggctgagatgggaggatcacttgaacctgggaggtcgaggttgcagtgagccatgatcgcaccactgcactccagcctgagtgacagagccagatcctgactgctgctcatagagatctcgcctaaagatcttgcctaagtgcaaaaacacacacacacagaaactggaacaaccgaactgaccctttggggaggctggcgaaataaatgacatggagtacattcatacagctctaaaaaaggacaaaagtcagggacatctgtgtccagggaacactctcgatttgtcttgttaagtgaaactggcgaggcgtggaatcatgagagaagcgtgagtagaggggacttaaaccagggactggtggccacagctagtgttagccaggggactggaggctgggagactgagaaggagattttcttacttcgtacgtgtctgtactgtttggattttttttttttttttttttttgagagggtattttttaaaaggaaaagcttgttttgtttttctttttaaaaaataggctctaaaaattctggagagaaataaaaaaggcaacatggtggccgggtatgggcgtctcttctgattccaggctggttggcactggccaccttgctcaatggttgccttagaaaccggcctagcgagggggtgtcagttgtctctggtagccattaaggcagtgactcagcagaaaacccaacccaagagggagttgttcattcactgactttccttctctcccagaaaagcatgggtgaggccatttctgttacatttgcgatcgggtggcagctgctccgccgtgaaggcggtagcgagaagtctgcccgctcctccagcctctcactaggtgagtggcgtctctgtgctgccctgtccctcagaaaccacaggttccggtccctctgccagcctgtcccctgtctctcccctcccgctgacagggtgaaaccagcttccgctcacaagcacttgctgggggttgccacaggcatggctcttggggagatctttagtaaaaaacccaaccaaacatcacgagtggaaccgagtgtggatcataaactcaactgagagaaaagccaagggacgcatgtgggcaaaatacacagaaaacccagcatgggcgcgggggctctcgcctgtcatcccatcactttgggaggccaaggcgggtggatcacttgaggtcaggagttcgagaccagcctggccaacatggtgaaaccccatctctactaaaatacaaaaattggtcgggcatggtggtggacacctgtaatcccagctactcgggaggctgaggcaggagaattgcttgaaccggggaggcggaggttgccgtgagctgagatcacaccactgcactccagcctgggtgacagaatgaggccctgtctcagaaaaaaaaaaagaatcacgtgctgagacatgctacaacacagatgaaccccaaaatcataatgctaagtgaaagaagccagacacgaaagatcccatgagtattatcccatttatatggagtgttcagagtaggtgaatctatagagacagaaaggagatgagtgactgcctcagctggaagggaaaatggggaagaaatgggtagtgactattaaaaggtatggtgtttttttttctttgtttttgttttgttttgttttgttttattttgtttttttgagatggagtctcgctctgtcacccaggctggagtgcagtggcatgatctcggctcactgcaacctctgcctcctgggttccagcaattctcctgcctctgcctcctgagtagctgggactacaggcgcccaccacgatgactgggcaatttttgtatttttagtagagatggggtttcatcgtgttggccaggttggtctcaaactcctgacctcaggtgatccacccacctcggcctcccaaagtgctgggatgacaggtgtgagccaccacgcctggccagtgtttctttttggaatgatgaaaatatgctcaaatagagtgctggttgcacaagtctgtaaatctattaaaaacacggagttgcacacttcaaacaactgaaccttgtggcgtgtgaggtagatgtcttaacacagctgttaaaaagcccaggatagctgggcacagcggctcagctgtaatcccagtactttgggggggctgaggaaggaggatcgcttcagctcaggggcttgagaccagccttggcaacctagcgagaccctgtctgtactaaaaataaaaataattagctgggcatggtgacatgcacctgaggtcccaggtactcgagaggctaaagcgggggctgtgggcaggagaacaaggctgcagtgagctatgatcacgccattgcactccagcctgggcaacataatgagatcctgtctcaataaacacatgaaagagacacatactgttatttcaaacttcactcaaaatacactgccttctatgtgctgggacccagagagggtttgtggcatgtttgtaggaataagtccggatcagaacggagctgagaatgggtgttcactcgtattcttcaatgtctcctattgagatgatgttatccacttgttattttcttgaccctattttctgccaagaaataaagtaatttgagagagagagagagagcgagatctaacgtggaaaaacagatctgcaggaaggcatggaacgcactagaaaggtaaaaaatgggctgtttagaccaacactaatagtgtcctttgggatttaaaatatacgaaaacaagagcacccgaggcccggcggaaacacagtctcgctgctgggaggctctggcgttgcttgagccactgcaccgcagactcaatccctagggtaactgctggagtaataatgaaaagtgacactgagaaaaggcaaaaaaagagaaagaaagtaaccaacgacagatgggacaacagagaacaaatggtaagctggtcctcacacacagccagagcaggagggtggcgggggtcagggtctaatggtgtggaggaggaggaggaggatgttgagggtgaagaaacaaagcccatgcccccgagttgtacacttataaatagttaaacagatgaatattatgttgtatatattttatcacaataaaagatctcacatacagccatattggcaaatccattaaaatgaaaatggataaacacacaaagattgccgggctggcgtagagggaaaataaaaccaatcaatcaatatgctgcctcaaagagacattctttctttcttcctttctttccttccttccttcctttctctctttctttcttttttgacagagtctcactctgctgcccaggctggagtgcaatggcgtgatctcagctcactgcaacctccatctcccggattcaagtgattcccctgcctcagcctcctgagtagctgggattataggcgtgcaccatcataccccactaatttttgtattttcactagagacagggttttaccatgttggccaggctggtctcaaactcctcacctcaagtgatcttctcacctcagcctcccaaagtcctgggattacaggaatgagccaccgtgcccggctgcattttattttattttattttatttttgagatggagtcttgccctgttgcccaggctggagtgcagtggcgtgatcgccgctcactgcaagctccgcctcccgggttcacgccattctcctgcctcagcctcccgagtagctgggactacaggtgcccgccaccacgcccggctaactttttgtatttttagtagagatggggtttcaccatgttagccaggatggtcttgatctcctgacctcgtgatccacccgcctcggccttccgaagtgctgggattacaggcgtgagccactgcgcctggcccattttatttcttaaaaacagcttttttttttttttttttttttttgacagagtctcactctgtcgcccaggctggagtgcactggtgccatcttgactcactgcaagctccatctcctgggttcacgccattctcctgcctcagcctcccaagtagctgggactacaggtgcccgccaccacgcctggctaattttttgtatttttagtagagacagggtttcaccatgttagccaggatggtctcgatctcctgacctaatgatctgcctgcctcggcctcccaaagtgctgagattacaggcgtgagccactgtgcctggccaaaaacagctttattgaggtataattgacataaaataaactgcacatttaaagtgaacagtttgaaagttatatctgccaaaccatcaacacaatcgagaatgaacccaccaggccaggcgtgggggctcacgcctgcagtcccagctacctgggaggctgaggtgggtggatcgtgtgagcccaggaattcgagaccagcctgggcaacatggcaagaccccatctctacaaaaaatacaaaaactggccggaactgggatctggaaggcggaggggacgcagtaggcatttgtgcactgtgagtcctggtgtggggccatcgcagcactgccagctcccatcaggtctccctgatcagatgttccaacatgtgtatacagatgtgtacaacacccaagagaaatgagtgtgtatgtgcagcaagacagattcggaaatgttcataacagctttatgccagccccaaactcaatccaaacgcccaagagtagaaagagtcaaatgcggcccattcttacaatggaacgctacctgggaaggcaaagcaatcgcttagcgctactcacggctgcaacagaacaacagtgcagagcaatagcaggcagacgcgagttcgtaccacgtgtgttaatccattctcacactgctgtacagaaatagccaagaccgggcaatttatatagaaaggaggttcaatgggctcacggttctgcaggctgtacaggaagcatggctgcatctgcttttggggaagcctcaggaagcttccaatcatggcgggaggcaaagggggagcaggcacatcagatggccacagcgggagcaagagccggacagtggaggtagcacacactgttaaacaactatcatgagaacagcacccagggatggcgcggaagcattcatgagaaatctgcccccatgacccagtcacttcccaccaggccccgcctccagcactggagattggggcagggacacacatccaaactaaatcacgacacaatctcattgacatgaaattccagaacatgcaaaactatctatgtgtttaaagccaggtttggatgttctctggtgctactctcatcaaaaaaggcggcccacagcgcctctccccttgcatacactggcctcagaggcttgcgtctagtgagcaggctgccggggaagtggcagcacctgatccccaggccaggccatcagatgacgtggcctccgctgggctttctagcttgagatgctccccggagaacccagcctcacaggcacatggaggtgtcctcaccccggcagcgtcctccgctggacacgaaggagccgctgggtggttccagctcgtggccatcgggctgccccggctaaccgactgcagcgggtgagctctgccaactgagacctcacagagcacaggctcgcgagcaaaacaaacattgccattattttcagcccgtacatcttggggtggcttggtacctagcaagagataactggagcagattcatatgtgggtctatgtggtggctgccacatggccgtgtacatataaaacagtcattgggctgtacgagtacggtttgtgtacttttctacctttaacttatacctccctaacaaagtctttcagaaaagcctaactcctgaggctctggtgtgggcagctgggtgggcgctggaactagtcccacacgctgaggtgggaagctcatggtgaaagggaatcccaagtctgcttggccatctaagtttacggtgcctgtgagaaaaatcagaaggccaaaacctcaggagagagagcatgacggaggcgctgccgtttgggaatggacatgatagagccgtgagaatgaggaagatcaccgtcgggaatgagtgcaggcagctaagaaggcgcagaggcgtgtctggagggactcacaccttgtagaggctgggtagagagagcccacgcacgctgagaaagaacacagacttcagcgtcacagaggtcacaagagacaagcggttggtgggggagtaggcaccggcgagagaaagtccaagaggactggatggatttgacaacacggagatccctggtgttctggatgaacgctgattggatggagtggcaggggtagaagcagaggaagagggactgcacagggaatgggcaagtgagaaaacagacaaggattctgaaaagtttagctacaaagaggaacagagaattagggttgtggttggagggggtgttgggtcaaatgagtttttatttttattcttcaagaacggaagctaccaggacatgtttgatgaaaatagatccagaggccgggcgcagtggctcacgcctgtaatcccagcattttgggaggccgaggtgagcggatcacctgaggtcaggagttcgagaccagcctggccaacatggggaaaccccgtctctactaaaaatacaaacattagctgggcttggtgacacatgcctgtagttccagctactcaggaggctgaggcaggagaattgcttgaacccgggaggcagaggttgcagggagctgagatcatgctgctgcactccagcctgggtgacagagtgactctgtctcaaaaaaaaaaaaaaaaagaaaagaaatagatccagaagcaaggaagaaattgatcatgtcgggtgacattatgagtgaagaagtcctcagaaaagaggagaaacttgcaattctggccacagtggaataactgatgccagttgtaaacacctaaaacactgggcaactatttttagatatcggacaataggctgtgcagggctgtgaccagagagaaaacaaagaaggtgagccttacaagtaccctgagtttctgcctggaggcactttcacaccatggttcagcaaaggggcctgagcggaaccagcagtctcactgaattactagagcgaccaagccaatagcagagaaaaaacagaatcccagaaatatgtaattaatccaaaagtcaaaacagatggggtaatagaaaacaaataacaagatgatagacttaactccaaccattaaatggaaatggattaaacagaccaactaaaggcagagattgtcagattgtttaaaagaataaggctgggctgggtgccacggctcacacctgtaatcccagcactttgggaggctgaggcgggcagatcacttgaggtcaggagttcgagaccagcttggccaacatggtgaaaccttgtctctactaaataaaaatataaaaattagctgggcgtggtggcacacacctgtagtcccagctactatggaggctgaggcagaagaatcgcttgaacctgggaggcggaggttgcagtgagccaagattgcaccactgcacttcagcctgggtgacagagtaagactcttgtctgaagaaaaaaaaaaaaaaaaaaaaagccgggcacagtgcctcatacctgtaatcccagcactttgggaggctgaggtgggtgaatcacctgaggtcaggagttcgagatcagactggccaacatgttgaaaccccgtctctactaaaaatagaaaaatcagtcgggcgtggtagcggacgcctgtaatcccagctactcgggagactgaggcaggagaatcacctgaacctgggaggcagaggttacaatgagccgagatcgcaccattgcactgcagcctgggtgacaagagcgaaactccatctcaaaaaaaaaagtaaatatacagacagccagggacaggtgcagtggctcacacctgtaatctagcactttgggaggccgaggcgggcggatcactggaggtcaggagttcgagaccagcctggtcaacatgtggaaaccctgtctctattaaaaatacaaaaaaattagccgggtgtggtggtgggcacctgtaatcccagctactcgggaggctgaggcaggagaatcacttgaacctaggaggcagaggttgcagtgagctgagatagcgccattgcactgcagcctgggcaacaagagcaaaactccatctcaaaaaaagaaaaaaaaaaaagaatttaaacaaggtcacagaatatacggttcatatgcaaaactcaaccgctttttttttttttttttttttttttgaggcaaggtctccctctgttgcccgggctggagtgcagtggtggaatcatggctcactgcagcctcaacgtcctgggctcaaactatcctcctgggtcagcctcctgagtagctcaaactacaggcatgcaccaccatgcctggctaatttttgtactttttgtagagacggggtttcgccatgttgcccaggctggtctcaaactcctggcctcaagtgatctgcccgccttagcttcccaaagcgctggaatcacaggcgtgagccaccgtgcccagcatcaattgcatttctgtataatatcatgatgaactagaaaatcaaagataccatttagaatagcataaaaaacatggactacatcaggaaaaacctgacacgggaagtgctgggtgtggccagcccagagtagtaacaagaccctggacgctcaagaaccctgaagtgtaaggcatcaggaaagctcaaggctttcggtgcaacaaagtccacaagtagagcccgagattgcaacatacgtttttattactcaaggacaacctggacgtcaccaatgcccagcttcacgggggcatgtagtgtgactcacggctgaacacaaaatcactgtgaagcctgtgctacagccctgggctacttttggacacgcaagaggacactcggttacatgaaacctgacttgcttctgaagacatgtgatacatgtcttttccctgaaaatgtttcccttccctgtctgccatgctcccaacttttctgccttccaggggcttctcactgtctgggtaactaggtcttgggcctagctagaccttgggtagtggcccctctgccacaatcagtgcctgggcctgaggctgagcttgtggcctccgaagcctgacctggctcggagctcgtctgtggcgcccagggatggcctggcttgcaggccaccacattaggccagctcgcaggtccccagtaaagcctgaagacactggcccgaggttggaggtgggtgctgctcgactttctggaggatctcagaattctcgcttcttgctaggactgaaccatgagacttacagccatacttcacttttcccagggtttttctttttgaaacagggtcttgctctgtcacccaggctggagtgcagtcatacaatcatgactcactgcagcctcgacctcccaagcataaatgatcctcctacttcagcctccccagcagctgggaccacaggcgtgcgctaccacgccaggctaatagtttaaaaaattttttggcagagacagggtctcatcatgttgccctggctggtcttgacctactgggctccagcgatcctcctgccttggcctcccaaagtgctgggattacaggcgtgagccaccgcacccggccacacttttccaaattgtaagcaggtaggagggccctaggcctcgtcggccccattgtgcagggtggccactgtccaaagagatgggcaaagagctgctgccagaggcctgggctgcagacgccctgcatggctctcaggggagccagctccctactccacacccctgcacagcagcccctctcctcccctcacgggtctgtgcagccagcagcctcccaacatgcgccagcctcctcactggatgatgccagccttccttgcccccagatgctggcatggaggcagggttccactctgcctgcctatgcccacagagcctagaacagcagggccacctccttctctcccccgcgggcatgggcccccacccccactgccggcagagtgctgaggactcgtgcaccatgagaacttctgaccatgagaactttgacttccggatttgggggatctgcccaggtgaacacatcagctctgaaattcatcactttcttcgggcccctgcctgtcctgttccaggcccaagcctacagaaggaagaggaaagtccgcttagcaaatgggggaggctcccctactgccagaagccctggctcaaggcctgggccatgctcccttatctcctggggcgttcgtgggaattgagggtttttgtttgtttgttcatttgtttttgagacagggtctaactgtctcccaggctggagtgcagtggcttgatcacagctcactgtagcctccacctcctgggctcaagtgatcctcccatcttggcctccaaaagtgctggtattataggcatgagccacctcgcccagctgagggttcctaagcagtggttcttcaaatagtacctgggatggaaaattcctgctggggcttcctatttcctgaaagcacagagtggggcaggcaccctcgggctaaaggaggtgctactgtcaggaggcgagggaaggagtgggccagggtcttgctaagggaggcatgtggggccggctgggcttctagaggtcgccagagccagtggcctgcccggctgccccacgccctcagcgcagtcgggacagacactctgctctttggggctgacacggatgcgcctgagcaccccagaggccagcctgggcggcagcacctgggagggagctggacgacagcagctgcaggctgtccagggccccatcctcgtacagggccagcttctggaccatcttctgtcgggcagggttgatgataatctgcggtggctctgacgacgatgatgcagagctgccaagggccagtcctggggtggagatggcactcccttagcctcatgctgtggctccccagcccgcagcctagcaccctgcctccctggcctcaggcctgaattcctcagagaagtccaagggcagggcccagctctcaggctaccagacagagccctccttgttcccagccttcaggaatggggtggggggagggctggagagcaagctccacctgggaaggatgtggcctggggaggggaaaccagggttgctaaggtcacagtgagctgaacatttggccctggttctcttctagaaggctggggtggggacttacaggggctttggcccaaagaggccttggtccctctcctgggaacccgtctccccagctaccttccacggctgtgggccgggatcctgggccactcccccagctcgattctcctgccgtgtccccctgaggacagccggcctccctgaggggtgctgggtccagagggcagcttggagtcaagtgccaggagcgcagggcagcagagaggccgcctaggctctcgtcactctccacgggctggttggggcctctctgcagctgctctgctgcctgggcactggctcctgatggcgctgccaggggctgccatggagcagccccactgtgggctctgccagtgctggacacgtaggagttctcctgcggggaaggggggatgcagctggcggcctccgaatgcccgggcacccccgccaccactgcctgcagcttctctagcctctcgtacacctgcaagtggaaaagagggactctcagggtgagatggcagccctggccggtcaccccgtgggcaaaccacagggctgctccaggccgtccgtgacctgccccagggctctaaaatgacataccctgcagctgggaacgctctgcccctcgcccctctgttcccatcacagggagtgctgagaagcgcggctgccaaaagcaaggactgagaatggcctcgttcttttctacaaaatgaatctcactgccccgctgccctcaaacggggcctctccattttcaactgtcaccagaggagaagaggtggggtactagggaggggacagaaaaaggcagatgcagtagtgcagtgcgcccagcagggggcgcggcagcagctctttccttctctctatgtgaagggggtcggagctgggctccgcaaagcaggactgcccggggcccctcagttcagaggggcgctgccccaaacagaaccaaagggcaagcaagaaatgtgtggagactccagagagacctagcaggtgctgagatggggtcactacagagcaaggcctggaatgcgggctttctatctggccaccccgtcccagtgcgcagctggctacctgggtcataggaggcctccttttggcccggcggtgcaggcagcagcaggccagctggcccaggcccaggcccagctcaggtgggcagggcccgggcctggggtccaggtgcttcttgtagatctgcatggcgatgggagcagcccaggcatctgcagccagacctgcttgcagtgtgctctgggtgcttctcaaagccactccagcctcctcagcctcctcttccaccaggtctttctgtgggataaatactgtcagtatggctaccaggtggccacacctgcagctgcagtcctcaggtccttgtcactcaatcgtatgggttttgataaaaaaaaaaaaaaaaaaaaaagagatggggtctcgctttgttggcctggctggtctccaagtaggctcaagtgatcctcccgcctcagcctcccaaagtgctggtgttacaggtgtgagacactgtgccacagctcttggtctttctacaacttactttttttctgagacagggactcattctgtcacccaggctggagtgcagtggtgcaatcatggctcagtgcagcctcaacctcccaggctcgtgatcctcccacctcggcctcccgagcagctgggattacaggtgtgtaccaccatgcctatcttgctatgttgcccaggctggtctccaactcccaggctcaagcgatcctcctgcctcagattcccgagtagcttctagagatttattaaacacctactgtgggccagtggtgctctgggccctagggatacaggaacaaacagaaccctgggacccggtttgacagagctgacttcctggtgggggagagccccatggagctggggtctgaaggcaggaagtagcctgagagggcagagccgagaaggaaagcgccccacagagaggtgccccacagacaaagaggtaccccagagagagaggcgccccgcagagaggcgcccccagggtggaaacaggaccggaggccatctccagttctgaaatcagacagaccaggaggaaccacctgggtgggcggtggcttttctcgcagagcgaacggcacatactaaggctgtgaagcaggcagcagggagcgccccgagtcccagggacctggggcgttggggggtcaaccacataagggactgggccttcaccccaagagcagagaaaaggcaaaggggcctttgaaaagagcactttggctgcagggtggggagcaagtggggaagtccaaggacccccaaggagcctggtgcgcttcttcagcaggatgcatggatggacggacggggaagggaaaggaaggagggctcaagcccggctcctgggttctcagcggggctgaatcctgacggagaccccacagcacacaggaaccgccccaaacaagaggagaagcagtgaagcaattactggctgagcacattctgtgaagtctgttttgcatatgggaaaacaggcccacaggggagcaggaatttgctggaaggccactgtcaggctggggctaaaacccaggtctctagtctcctggccccaccacagtccacggtgaggcagactgagtggagtaagaccgtgaggcagctcaggctgccctgcacggtgcggagagctcagctgcagcctgctggggcccaggaggttcctcggggcctgcttcttctctaccaccgcctttctccggccagagtcctctgagttccactgcagcttgggtctcagtgccctgggaccgcccttccccctgcccccagcccaggtggggtctgtacaaggcccatagtgtctgcaggacagacaggtttgtcctcggcaaggtaaacgaagttgtttggagccctgcctactttcaaaaatgaggccactgtggcagcagaggcatccatgggcactgcgccccagttatccccgccactggggctgtgcctgctggctgccagcagctgtgtgtccctcctggccctgcctcaaggggctcaccagatacttggtcctggcaccgtgcgtcttcacagccctctgaccagccaaggtctctagcactacctggagagagggaagagggagagcatggcagtggccttggcagggaagaggcctctggtgtggacatggattgggcctgacaagggtgtggacaaaggcagagccagatgttatgggactgaagctcgggcaactcggagagcccacttgaagacaaattacaaacacacagttaggtgcagggtgaggaggagggcctcggagggagggggaccctggagctgcagcctcctggggtcttggcagatggcccctggcccgcagtgcactctgcagcccccacctctgcctgcctgtggcttctcctcctctgagccagcagaggggtcagtggctcaccaccccaaagctgaaggtgtccgtgtccacagccagccttcccgtcttgatgtactcctcgggcaggtaggccagggtgccccgcactgtctgtgtccgggccaccatgctgctctggctggggctggacccggcaaagcggctgaaccgggccaggccaaagtctcccagcttgggtgtcagcctctcatccagaaggacgttggaacttggggagagaagacagtggcgtcagcccggtcctagctcctacacctgcccggcttagataaggctggactcgaggctgccagcccggtgccttgcccacagaaagcgctggcactgccctgagcgctccagctgcctgggggcctctgctcatcagtagggcccatccttggcccgttcccacacctgtgcgatgccggggtgttgaggtcccaggccatgcctgatccccacattgataggacgcggggccccccttgctgcaggccctgccccggcagttctcaagggcccctcctcacctcttgatgtctccatggatgaggctggggctgtcctgatgtagaaactgaattgcccgggctgtacccagaaggatgtccagtcgctgaggccaggagagaggtgggcaggcctgggtctggggtggcaaagggggacaggggaggttgctggatggccgttccttgatcccaaccatccttctacctgtcaccgtgcagcctggaacagccacttcactctctaggcctcagtttcccccttctggaaaacgaggagcaaagtctccgtgacctgcacttcttaagcaatggctggggacacgttcaatagaatctgctgggcttcggctcccagggctcatccctttgtccctggtggtcgggaagtccttgaaggcattcttcccgctctccccaaacgcagcatgcaggaggaggcaagggggccctccctcagctgtaggtggtccagctggtagccccagaccccctcgcctccggggcttgctgatgagaccctccagctacgctgcttgcaaaggggagaggcctgggaaagagctctatagaaaacattgggtcgggccaggcgtggtggctcacgcctgtaatcccagcactttgggaggctgaggcgcgcagaccacctggggtcaggagttcgagactagcctggccaatgtggcaaaacctcatctctactaaaaatacaaaaattaggcaggtgtggtggtgcatgcctgtagtcccagctactcgggaggctgcggcaggaggatcgcctgaacccgggaggtggaggttgtggtgagctgagatcacaccactgcactccagcctggatgacagagcaagactccacctcaaaaaaaaaaaaaaaaaaaaaaaaaaaaaaattgaccccaccgtgggccaaatcctgagccgggtgctgctggggagctggaagtgcaggcctggcctgctggcaggacccactcacacaggctgaaagccctaggccccgcgcccggctccagccaggtgtcaggagtgctttgggtcctgggaagcgtgccgggccaggtgagcctacctggcagtggagacggtcctccagggagccgttgggcaggaagccgtacaccaggcagtagaagccgttctgagcacagtagccagcaaagtccacaatgtttgggtgacgaaacctgtttgaaaaaggggagcactttccatcaggccagactgggtgggcagccctggctggggcctcagctcgcccgggcctgccaggcctcaggtgcccaagggagccaggtcctgtggtgtgcggtctgaagccccacgggacctggtgtggctccccctctggcctcacctggacagctgctccacctcggtcaggaagctctgcttcactgcagtccactccaggtcagcgttctgcagcccccagggtgcggtgggggaaggggcagggaagacgggcagcgtgaggctctcgaagcgaaggccttcgggccaccagtgccacctacccgaggcccagaaccaccaaggggccagggaccctacgccagaatgagggctgaaggagttgtgtggggaagcgagggggaaaggctggagaagtggtgagggttatctgatggccttccagggtccctgccagggtgcgacactcacctccttcagcctcttcacagcatacaccgtgttcctcatcaccgcccggtacacgcacccaaagccaccctccccgatcttgagctcctccgagaagttgtgggtgccccgggaaatctcacagaggggccagcaaaacggaaaggggcgggctccctgcaggagggacactgagctctctgggcctggctgtgggaagagagcctggatcaggtggggtccctgtctcttcccttctgcccaaggctccaggctctccccaccacagctgcctcccagctgacccagcttggctgactggggctctgcgctacatcaaaggctgaattccttcctccttgtctcgaatcttccctggggggcaggggacacctaccttggtagaagaaggggctggagatggcggtggaggccacagggaagcagggcttgggaccaggccgagctcaggccctgaatgggtctgggagcctggaaaagcttcataaagacaccagtgagaggcaggcagagaccagcagcagggtctacagccgtggccgtggtcaaggtgggctcttctttgggtccaccgagcctaacaaccgggccctcttacctggggagaggaaggtggaggctgaggatggcaacttccgggggctccaggcctcggcctcggcgggtgcagggatgctgctgggcctcggggcagtggtgcctggggacggaagcggggcgggagggtgccctgggacgccaaggaaggaaaggaaggttgaggcccgggtgggggagccccgtggggcccgccggcctcccagccgtggggtgcccggagtcccgcgctcacaggctgtgatgatgtcccgcgcacggagcagctgcaggtgcgtgaggatgtgcacgaggtcggccacacgggcgttgcggttgatccagggccacaggacgctggccgtgcgctgcccggagcgctcgcacagccgcagctcggtctggtcgcgcacgatcagggcggctgcggggcggggggcgtcaggcgtcggcgccaggagcccgcgcgcctcccgccccccggcagcccgccgccacccaccgaactggcaccagtcggcgggctccagggcgtccatcactttgtagaagcggcacatgacccagggcggcacctcgtacaagaagtgctgggcgccgggggctgcgggctcccccgggcccggccccccggccatggctgccgccgccgggccgggacctgccggggcctctcagggccgcggcgggcgcgggcctgggccggccgggtccgcggacactgactcacttccccttcgagccggcctcgtgcgacgcccggcggggcggaaggggcggtgcccgggcccgccgccatcttgcgcgccgcggccgcgcgctgggtcacacgggggcgccccgcgccggggagggcccgggtcccggcgggttccgcgagcggcgatcggcctcccgggctcgcccgggcggggctctggaggacgaacggcggctcccggcgttggggacagagggcagggcggaggcccgggctgctcggaaaggggccggggccgggccttccgaaagctcctgggcggccctgccggaaccctgctctccactgcggcctgcagggctgttaccaggagccctgcctgcccgccccacgtctagccccctgcacacggcagcagccttgagccattcagtctccttaggtgtcctgaaatatgccgagaacgctgcccgccacagccgtgagtgtatgcgttgctgctgccccagccctcatttggcaagggtgagctcaggcagctgtggtgaaggcttcctgagcccgccggcagagctcctgccaccccgtacctgtcccctcctgggcatcgtccttgattacttgtctggaccgccacccccggtccccgccctgagatggggaagaccccacaagcagcaacgcagacttactcttttgtttctccagctggatgtctcctccagcgacagttccccttgccctcttgatcctgacagcgaaggggttccccacccctagccctacagacttaggacttttcctagaaacgagaagtgcccaaggcccacagctggcccctgttggagtctctttcctgaagccaccaccactgtggccactcccaaggaagatgccaaccataccatgaaacccatggcttctcacgggacagactttactgagatgtaccaactcaagtatctgaaatgactgcacacccatgctaacctccacgggggcacttggtcctacttacacacaaaggcccatcagctcacggaacagggctggcatacgagatgctcaatgcatacaagttgacttttcaaccctgggatctacctttgaaggccaggccttccgagggtaccttctagcatgtgcatgtgaagctggactcctttgagcagttgtctcctccagccccttaccaacctggtgaggctgctcctgagagccaaggaagccagtaacaagggggccccctttgggcaaacccctcagcctgcccttgcctggtcagagaaccacgttagcagtcaacagagggcacgtgagggtcctggccagaatgagacacaggaggagccacagcctgcgggggtgggggtgtccaaaagcaccacagcacatccagacctagggggtgcccctaccatacgggtctggagcagggaggttgtgctgcaggctgactcatgccaggcccttcccgtcacacgctggagcagtgtgcctggagagcactggcttggaagaagctgaggggccagcgaggccagcatatggaggaggcttcccttggccgctcgtggcaggcctgaaggcagctacctgtgtccagggacagccagatc

SEQ ID NO: 6460 - DNA, 813 bp, Homo sapiens
agcagcccggggcgcggtaggccgccaaagcggaagaagaagcagcggcggaaccgcaccacgttcaacagcagccaactgcaggcgctggagcgcgtgttcgagcgcacgcactaccccgacgcctttgtgcgcgaggagcttgcccggcgcgtcaacctcagcgaggcgcgcgttcaggtctggtttcagaaccgccgcgccaagttccgcaggaatgaaagggccatgctggccagccgctctgcctcgctgctcaagtcctacagccaggaggccgccatcgagcagcccgtggctccccggcccaccgccctgagtccagattatctctcctggacagcctcgtccccctacagcacagtgccaccctacagccctgggagctcaggccccgcaaccccaggggtcaacatggccaacagcatcgccagcctccgtctcaaggccaaggagttcagcctgcaccacagccaggtgcctacggtgaactgaagtccagtccccccaggacccagacgcctccctgggtggacagcaatagaaaagggggcagacgcccaggaagtgaccttctcctggatgagctctcctggcccgtctgtccagcctggactcccgagcccacgaggctgttgaggcccctgcagccgggcgcagctcttctgtccttggccaccagagactgcagcccacaacccttggaggggttgggccggaaggtggaagagcctgccaaggacctcatttagtttgtgtattaaaaccaaaaagcttttgtctttaagaaataaaaccatttttttaagcccc

SEQ ID NO: 6461 - DNA, 143068 bp, Homo sapiens
aagcttcagtatgcaaattttcaatgacatgtgcctgtggattctgaaaattcacagatctgtctatccttagctgagactgaaggcatctacttcccaatgaccaaatcctggtgctgtggcgacactgagcaggaactccattagaatatcaatatcactctgcagacattccatgatgtaagctatgttttctcttgttgcaattacacttaatttaccaccagctgcttcaatgtcatgggctatcttgaaaaatgaagctcctttcgtagtcaaactggatgcaagacacagcaaatgagaagttactaaattgttggagtcctcatagctactgcctgctttaatgaacaaaccaattcttgatgcagggcatagttttccaaaggagaaatcataaaaccatttggaaatttgatgatctcaaggtcctgatgatgtggagccactcctatgggggtagctgtggctttaactttgggggcaactttgagggaataaagtctcaaaaagagggaataaagtctcaagattgttcgtgacccatagtaacttctggcttaaaggaccattcggcaagtttttaaatgtattttctataatttccatgtagttctttatattttctatttcttatttaaaacctctattttagctcgtttcctttgacactgctctggcagggaaaggggtggcactgcctcattactgccaggtaggggtagaagtccattatccacttggtctccattgatacccaaagtggggagaggctcctgttactgctggtgagggtgggagtccccccactaagtttctgctaatactgtcctggtggcttgctactattcccatgaagcctccactgatactacattacttttgggtggtggcaaatgtcctgcctctccactagccctcctgctctaaaacaacccgagtagggagtgggaaggaagctttgttactggtaggtgggagctgaagtccagacttgccacattgtcccactgatgctacagggaggaggaagcgggccacattactgcctgatagggatgaaagccccagctccctacctggccttcgctgataccagcctgctacaggagtgaagagagatttgaaggcctcaatatagcctgtcgagggtggaagtcttgctcccaatgggcctttagcagcatgggtgggtgtggggccatagctgtctctgtactgcttggctagagtggagtatttgaggtccaaaagttttctgtctttctagccctttggttagaaagagcagacttttgttggaagtatttttttgtgtttacctgttgtatttccaggttcctagcttctccagcacagtctgggatgtgtgagacacagagaaaatccagtgatgttactaccgtatggtttcttgggtcccaacgtctctagctaatctgctccaccttttggagttttcttatttgttttagatcagggatttagtcatatttaataggagaaatatggaaaaatacttctactctatcttcctggaagttcctgtttattttttatgtccttttcctctggctagaccgtaagagacttacgaaacaaacacttacacattctactaaactcaatgtccaaagtttgtgaacttcttgaatattgcttgttcatttccacccccagtcactgactgaatctccctgctgtctgtctacaatgccaatgagcttctggttaacttcttctcatgcatgcttaggcaacaacttcccagttttactacacttgcccatccctagttttgttgttgcttaatcccttggcctagtgccaccatactcctccagcagagcaaccaattcttacattataggacagcacatatccactaaaaacagttcatgccacaccaaccacatttccctttgtcaacaaaattacttgatagataattccaggaatgcctgatgaagctgattgacaacaagatatttggcagactctctgctgcctatacataccttagcatgtggaactcaagtaatgagaggtccatttaattggattgaattgggctggataggattggattgaatcctgtgggatggctaggctaaattagaaatgaagactagtttaacagcagtatccaaggatagttgactaatgagttaattttactctcaaagacagtctttagtagtaagctgtaatgcattatatcaaactattttccagtcaatgatttataagttacttgaataaggatgctaaagatgtgccttattgaaatggcaattagcacaaagttgggaatgaaatctaattagttaaataacagaatcacataaaaaaggacttgaataaatgtagcatcctaccatgttcctggatagaaagactgctatcgtaaagatattcattctcctcaggttaaattataaactcaatgcaattcaacaggattttaaaaaactagacaaagtgattccaagtttacgtggaaaataaaatgtgagggaccaaacaatatttgaaaaagaaagagaataaaatctcatccttccagataccacaatgtattataaagcaatagtaattaacatgagggcagaaatgagcaagcaagtgaacaaaataagacagatagtcacaggaaactcatatatttataggtgctttgcgtataatgaagatggtccttcaaatcagttgggaaaagatgggttattcaataaatggtgttgggtaaaattggttatacattggtgagaaataaagtgaaactcctactttgtatcatatgcaaaaaatagattccagacagatgaaatatttaaatgtaaaaaataaaattctaaaactactagaaaaaaaagaagaatatttttattcctttgaaatagaaaaggtcttactaagcaaaacacagaagtaataaatgaataaatgaagacaaatatgataaaaataagttaaaaatataagcaatctttctttgtttttttttcacctttcctagaaaaaaatatataggcaacttgttaagcaaggtagattacaagaaaatatttacaacatttgacaggccacagattattatccagcctcatctgataagaaaacttcaacataaagatatctgttttttttcttataaggttcctcaaagtgagccaatcacttcttaagctgaacaaaaaacaaaacagaagtgatcttttccaataatgaaaacaaacattgacagagcagctgtaggatcctttcaggcaaattatgaaaaggtgccctttctcagaaaccacagttaccattcagctttgtgaccagaggtttgactgtaccctagtccctactagcaacccaaccacataaccaacttcaaaggtcctgaatgactgtgttgtacttaatggcagatgatctatctcccatttttgtcctaaggattttccaagataatatatttctgcatttgttttgcttttacttcactccaaattgaaatctatttgtgggataagactaaagaaatgcttataggaaaattgatagcaccaaattcctatcttaaaaaatgaaaaaggtttcaaatcaatgacctcagcttttactttaagaaaatagaaaaagcaggataagctaaagccaaagtaaacagaagaaaggaaattataaagataagagcagaaatcaatgaatagaaaacaaaagaaaaaaatcaaaccaaacagctgattctttaagcagatctataaaattgataaaactctagccagattgatcaagtaaaaaagagagaagacacaaattaccagtattaagaatgagagaggcaatatcactacagatcctacagatataaaaagtataagggcatactttgaataattttatgactataaattaggcaacttagataaaacaaatttcttgaaagacacaaacaaccaaagctcacctaaaatactcacaaattgaatagtcttatagctattacaaaattgaggccaggcgcagtggctcaagcctttaatcccagcactttgggagggctaggaaggcggatcacgaggtcaggagtttgagaccagcctgactaacatggtgaaaccctgtctctactaaaagtacaaaaattagccaggcttggtggtgcgtgcctgtaatcccatctactcaggagactgaggcaggagaattgcttgaacctgggaggcaaagttgtggtgagccgagatcgcgccactgcacttcagcctgggcaacagaacaagactccgtctcaaaaaaaaaaaaaaaaaaaaaaattgaaattatagttaaaagtcttcccacaaagcaaactctagacccagatggcttcaatggtaaattctactggacaatcaaacaggaaacagtaataattctccacaatgtctttcataaaattgatgcggaggagatactctccaactcattctatgaaactagcattaccctgataccaaaatcatacagagacagtgtaggaaaacaacagatcagtatccttcatgaacataaatgaagtacaatgcagtcttatgcataaatcagagcttcattgttctacagataaggtaatgtaggattgttggttgcccctccaggtctgttaaattcacctccttccccagagagcatccttcttaaggacagggagcctcaatatgtcagtcctcacagcacctccctcagtcttcagcacttaccagctcatcaccacaaccgataccacattggataatttcatgaattactttagagcaaatgcaagagaaaaaatggatttttatataggagaagaaggaggaaattcttgtggatttggtacagaatagggccaagggaaaattacagatgtaaaaagaaaagtgtgtgaaatagtatccttagtgctcacaaatacaatgatttcattgtttttaaaaataaaaaatgacaaatgtctaatgcttggtggtaatgctttattgaatgtgtgttatacactggttcctcattcctgaagttagaaataataccttcctcttttcatttggttatgtttgctgaaacaaatcaaaggctgagattgaaacacatgctacttcaggtggatgaccttactactaagctcatcacaacagcacttacagctgaagaccccagagtcctacctaacttttgtcacaacccagattttggccatgtagttctgggccttaccattaaagcagacagaagtcagaggaatgactcctttccacttgaagtgagctgcaggcttctaggaaaggcaagatgcacatttccctcctgtggagcataaagcctttgtaattcaggacttaggacccatatggatttgaaatattatgacattggagctggagtggttggggacaacaccagtagtgttataggccatggaatgtcaaaagaacatggaaccctgttaaaatcattaaacatcaaaactctcccctcctctggtgatatggtttggctgtgtccccatccaaatctcatcttgaactcccatgtgttgtgggaggcacccagtgggaggtaattgaatcatgggggcaggtctttcccatgctgttttcacgatactgaataagtctcacaagatctgatggttttataaaggggagcttccctgcacaagctctcttctcttgtctgccaccatgtgagacatgcctttcaccttccgccatgattgtgaggcctccccaaccatgtggaacttttaagttcattaaacctcttccttttgtaaattgctcagtctcaaatatgtctttatcagcaacgtgaaaacagactatctgattttctgtgggatgtggattatgaccatggacagagcataactgggacagagctggaaaaaatattaattaggtgcttaaaaatatttgttagaactatcttcatgaatgagaatcaatcctgtttccatggtgattcaccaggcatcaattccaagcatccatgaatcagaaaagtcctatcttctcttagttatcatccaggactccaaggaaccataattagccaacctgttcacatttccttttcattcactagcctcgaagtttccaggggacagggactctgtcctattcatttctgtaaccttaccacctgacccagaatagctgttccctgaagatttggtggattataaatgtggatgtcttatttctttgaaagtgtgagcttcaggtactgatcacgttattccaattatcaatttagtatctttcttcaccattaaactgtgaaattcttgagggaagaacctatgactgatttatctctgtaaactcatgccaccagtattcaaaatcacacctagcacatagtaaacactcaatgtttgttgaatgactgaaggaatggatgaaaatgaacctccttgcttctgaccagtggatgagttgcttggccgtgttcctacagcctagagctcatcccctaaagcatctgaagttacccattagtgcaatggttcttgaacgctggtgttgatcagaatcatctggatgcccaggttctctgaaataagatagggtctaggcatttgtatttttaccaaggaggtgtgatggagtcagatgcaagaaggctagttgaagaaaccacatgagagtttagtgtagtgtattagaagactggtttggctctgtcgctagtggctacatcatcttgctcaagtcatgccagtctcaggacctcattcagtctcttcagctgtaatatgggtgggttgcaccacataaccagaaagatcccttccagctctacccacttacaacatggtcaaatttggtctgattttttaaatcgtagtacaatatatatgacataaaattcaccattttagccactttaaatgtacaattctgtagcattaactacattcacattgttgtgcaaccatcactaccgtctacttccagaactcttcatcttgcaaaactgaacctctgttgtcattagtcactaactattcctctccccccctccttctaggccctggcaatcaccattctactttctgtcgctatgaatttgactactctaggtaacttatataagtggaatcacagcatttgccctattatgactggtttagttgacttagcacaacctcctaaggctcaaccacattttagcatgtgtcagaattttctttgtttttaaggctgaataatattctgttgtatctgtaaataacatctttattcatttgtccatcaacagactgttgagttcctcccatcttttgactattgtgaaaaatgctgctatgaacctgagtgtacagacatctggttgagtactgctttcaattcattgtttatatggatcatatggtaattttatgtttaatttttttggaactgctacattgttttccacagtgtacatcattttacatttccatcagcaatgcacaaaggttccaatttctccacattcttaccaacattttttattttctgtttcttatttatttgtttatttattctgagacagagtctcactctgtcacctaggctggagtgcagcagggtgatctcagctcactgcaacctctgcctcccatgttcaagtgattctcctccctcagcctcccaagtaaatggaattacaggtgcccaccaccacgcccaggtaatttttgcattttttttagtagtgatgaggtttcaccatgttggtcaggctggtcttgaactcctgacctcaagtgatccacccgcctcagcctcccaaagtgctgggattacaggtatgaaccactgcacccaggccattttttgctttttagataatagtcatcctagtgggtatgaagtggtatttcattgtggttttgatttatatttccctaatgatcagtgatattgagcatctttcaagtgcttattggccattttcttctttggagaaatgtctatgcaagtcctttgctcattttttaatccagttgctttttgttattctttttgatttgaaagtgttctttatacctcttgtatactaatcccttatcagatatgatttataaatattttcttcttttccatggattgccctttttactctgttgatagtgttctttgatacaaaataatttttaatttgaatgaagcccaattaatctatttttgtttcttttgttgcctgtgcttttggtgtcctatccaagaaactgttgccaaatccaatgtcataaagctttttcccatgcttccttctaagagttttgtagttacagctcttgtatttaggtatttgactattttgagttaatttttgtacatcgtataaaataagaatccaatttttattttattttactttttgtatgtggatatccaatttccccaccaccattcattgaaaagactgtccttttcctatcgaatggtcttggcacccttgtaaaacataatttgaccatatatgtgagggtttatttctgggctctctattctattctattctattctattctattctattctattctattctattctattctattctattggtccctatgtctttctttattctagtaccaccattttgctcatcataactttgtagtaagttttgaagtcaggaatcgtaagacctccagctttgttcattttcaaggttgttttgattattcaaggtcccttgatagtccatatgaatttcaggatggatttttctatttctgcaaaaaaaaaaaaaaaaaaaaaaaaaatcattgaaatttttaaacagattgcattaaatctgtagattgttttgggtagtattgacatttaacaacattaaatcttccaatcaatgaactaggctatttttatttattttttctgtttctttgagctacttttgtagttttcagtgtataagtttttgctacctggttaggtatacttctaagtattttctactttttgatgctattgcacattgaatcgttttcttaatttggtggtagcggggattgtgcattgttagtacataaaaatgcaactcattttttgtgtgttgattttgtatcctgcagctttaacaaattcatgttagttctaacagacttattctatgaatcattagggttttctacataaaagatcatgtcacctacaaacagagataattttactccaccccttcccgttgcaatgccttttatgtctttttcttgcctaattgttctggctaagacttccactaccatgttgaatagaagtggtgaaagtagacatccttgtcttgttccaatcttagagccaaagctttcagtctttcacggcctgaaagactttgtaatatgttctcaaggttaaagaacttcagaagttttctaagcaagagaccattttattaacttagttggcagcaattctgagagattagaatgaaaagatagaggataagaagtatctggcaggtataatatattgagtgtgctgaatatacttttagttttgtataggtgttaaaaaatggcaaaggaggccgggcgtggtggctcacgcctgtaatcccagcactttgggaggccgaggcgggcagatcatgaggtcaggagatcgagaccatcctggctaaaacagtgaaaccctatctctactaaaaatacaaaaaactcgctgggcatggtggtggacacctgtagtcccagctactcgggaggctgaggcaggagaatggtgtgaacctggaaggtggagcttgcagtgagccgagatcacgccactgcactccagcctgggcgacagagagagactccgtctcaaaagaaaaaaaaaatggcaaaggaaagaatgaaaaataaagcaaggtcccagaagaggccaaaaatcttaatcaaaattgactgaacattacggaatgaaatggtttttcctttactccaattaacgacttcacaagaagattccatcctcgtttataagattaacccaaaaccagcacttaaaaccagaagccttgaaaggatggagtttggggacccttctcatgtctattcccagaagggggtcttcttctggggtcctgtcccctaaagagctaggcaaaaagtatgcttgccacatctgttgaaagatagaaagttggtctaaaaatacatgagagggaactgaaacatttcagagaaggcaagactcagaagtaagaaaccaaaagaggaaggtaaaattctagttacaaagaaaagaggaatggaaattaaattgtcttacagagaaaatccagaactgccccctcttcccttactactccatcaaaaaaggggaaaaatagtcaatgggaaagttttgagaaaaatagatctctgcattcttctggttgagaattcagacaacttgaactagagagctgggtaatttcttgactaaaggtgtgttagatctgaaagggtttttcttaaaattgtctgtgttcatccctcccatcttagagaggaacacaggataagagacctctggagctcccccagggtcaccgagctaataggatcagagacaaagctacaaagtcattttctgacatctctccagggctctttttttctggaccccccatatcaacatgatgtatttattacattggattagcaactctccttgagctttcctcagtaccaggtttacatctcagtctgtgggtctcagagaaagtacccaatcagcagcaacattacctggaaactcatcagaagtgcccctcctcagccccaccccagatctatgcaatcagaaactctggaaatgcaggccagtcctaacaagcccaccagggaattctggtgcactaaggtttgagatccactgatcaaagaaataatattccttttcttcattataatagcatgaataataactaacatgtatttcacaatttacaaaagagctttatgctcttgttaaatttgagggtagtcttctcaaaatctctgtgaggctagaaagtcagatattgaaacacctgttttatgggttcaaagataggttcaaaagagagtaaatgattgttggggtggcaggtccagagagggcaggatcaaaactgcaattgagtcttctgccttataaaccagcatagcttccccaaggcacgtcacttctcgataaaatggtgacaactagagtgtcctttcagatcattcttagaagcatggagtgctaggtcaattgtgtaattgatgaggaaataataatactaagaactcccatcttctacgtccttatatacaatcctgtcaggtagaagctgagtctcagagagaacaagttgccctcccaggaccaccaggtaagctcggcatagctgtgcttagaatgtaggctgtctggcttctgggcttgcctgcccagggaggctttgtgggttctacttggtcatccagatcacagaggggcagcactgactcctacccagtgctcttgactgtacatctaatactttctactaagaaaaccccttctctttagaccaatggttttcaaatcttggtgtgcattggaatcacctggaaagcttgttaaaacacagattgtcccaccccaagagtttctgattctgtaggctggggtggggacccatgaaagtgcatttctaataaggtcccaagtgatgctgatgccaccagtgtgtggacaaccctttgagtggtgaagctctggacaccctaatttgcaaggctaatcaggcatatgtggcaaatgaatacgaactgaaattctgactccaatatcttcactgatattcctaatccatagcatacacacagtcccattcgtttcccttttagcttttaatctacatttatcctttcttcctctgccactgccttctctccagttagctcaaaccaggtaacacataaccgcctcctaactcatccgcccagttggtttctttggctttaatctagacttcttatctccaccagatttgccttaccaaagcaccaatttcttaaggcagggttagaattaaaaatcttctgttcctcctcattgcctaaaactcctaaacttatgattcaaggtcttccatgaccttcatggaccagtctaacgttttagcctgtcctaagtgacatgcctccaccacatacttcatgctttccactttctttctccatgtctttgttcatgcatttccatttcttctacctgcgatgtcctccttcgccatctctgtagatttaaaaatcctacagggctcatctcaaatgccctttccttcatgaagcctttcatgaaatccccatcgagaggttttccctcctctcagctctccaaagcacagatgtctgcgtttgtggctattatcttacgttgttttgtattaaaatttctccagctttacacatttgtcatcctcttaaggacaaacatcttattatggtcaatgtgaagctatagaggataatttaatgaaatattccaagggctagtcattacacatgactgatttatctctgtaaactcatccacactcatccacctgattttgattggccaagttaatgaatcagagaggaaaagatggtaaaaatataataaaaatctcctaggtagtctcacatcccacagagccccaggtaatgaaatgaggccctgagataatactttatgaacaataaaactccgggttctattgacagtgaagcaagacctgagagagaaggctaaattcccttgtgtctagctgccacaatcttctgagaataatggcctttcttcccgtctgccttctgaatcataggcaaatttttctctttggtgatccctaatacagaaaggggaagtcaaataaaatatatacaaggagaaggattctgggagacagagtttcttgattcccttctgcatgctcctcctcaaaagcctttatgagcttaccttacatttaaattcttttaaacaaggcattatgtggtctggtcttttccagctccacacaccttcacactacattccccccagctaattctgctctgggaacactgaccttcttttagttctttgaacacattgatttctggtcaagatgactcagtaacttcaacctttgttgtgcccttggtgctgtgaagatatagatatatattaaccactgcacaccagaaatcagaaatagcacaacagagaataaagtcattgagccatcttctgagctccaaaagacaaattttctccaaaaagacaaattcaggctctaaaacaataccttaaggaaccagaagtggaatagaaaattaaggtggtaagcagggctaaaccacatgcctgttgagcccaggtttggaagaagacaatggcaggtaggaatgtggtttctgatgggtaataggtactgttttcatttactttctgttgcttataacagaatatctgaaactgggtgctttataaagaaaaggaatttatgtcttgcagttagggaaactgagaagtcaaaagttgagggctgcaattgacaagtgccttcttgctggtggggatactctgaagagtcttgaggtggtatcgggcataccactctcagtgaggggactgagcatactaggtcaggtctttcttcctccttttataaagctatcagtcccactcttatgataacccattaatccattaactgattagccaattaatccatgaatggattaattcattcatgagggcagagccttcctgacccaaacacctcttaaagactccacctctcaatactgccacatgggggattaaatttcagcatgagtttttgatgagacaaatattccaatgatagcagttattaaaagtacatgcttgagagaaggggattggagtcagcctcagtgcttaaactcaaaagctaggatgaggctctaacactcctgaaagaaggagttgctgctggctccttaccagggctatatcttttacagagcaggagacctaaagaggcaggaggacccggacatcgtttggaaaccaagcactaaaacaggccatctgttatacccccaatatcctctcaggacaagtgttttgaaccactcacacaaggactagtctgggcaagtgggctagatgaagaaaccacaaaatagctaagtggggagagaaagaccaaaaatactattttattcaaaatgaaaatacaatccaaaattccatgattcatgaagaaatcaaatggtatgtgttaggtggttcttgcattgctatagagaaatacctgagattgggtaatttataaagaaaagaagtttaattggctcataattctgcaggcttcacaggaagcatggtgctggcatctgctcagcttctggagaggccccaagaagatttgctcaaggcagaaggttaagggagagctggcacatcacatggtgagaaaggaagctagagagagagtgcagggtgaggtgccacaagttaccacagccagatctcttgagaactcacttactttcatgaggacagcaccaagccataaggtgtagggagccaaagtcccatgggacatgaccaactcagcattccactggaggctatatgatcaaacagcaaactgtttatcacgaatgcaggatgtgagcaaactcacaactggtcctgccaacagaaggtttgttggaggcaatcactccctggtgcctgaggtaatctactgcaacatctagagaatgcagtcttgcaagcctactctggacagggcagctggcaccttattccatcccccttctcactatctttttttgcctaataaatacagagggctgtgtaaagctcagggcccttgtccactagaggcaagttgccccctgaccccttcttccaaatatactcttttgtctcttgtcttttattctcacatttgccccctttgttcagttccactaggtccgtgcgggttatatactggtgccctgagcagcaacagaatcaggctctcaacaagtgtcatccgaacatgggactttgaggacatgaacgaagaaggtctgctggagcagaggaacagaaattgacaaggtgaacagggaccctgggacgagtctgccagcagcggatataaggtcagttacctaaagaggtactgatcagtgccctaaagagatactgggagcagtgctttaaagaagtactgggaatgggaaattttctgaatcagggtaacaaggggaagaatttgtctattaaagaaaaacattatgtgcagttgcttaaagttgtattggaacagtctggagcttaggttaatttgcagacactaactatcacatgcgtccgtgtgaagagagtccaccaacaggctttgtgtgggcaataaagctttttaatcaccttggtgcaggtgggctgagtccaaaaaaggagtcagcaaagggagatagaggtggggcagttttataggatttgggtaggtagtggaaagttacagttaaaagtggttatctcttgtgggcagaggcaggggtcacaaggtgctgggtggggaaatcatgagactctttttctgggacaggagtgtcacaaggtcaattgatcagttggggtggggcaggaacaaatcgcaatggtggaatgtcatcacttaaggcaggaactgactatttcacttcttttgtggttcttcagttgtttcgggccatctggatgtatagtgcagctcacaggggatatgatggcttaggttgggctcagagacctgacattcctatctttttatattaataagaaaaacaaaacaaaatagtggttaagtgttggggcagcaaaaattttttggggtggtatgtagagataaggggcaatgtttctcagggctgcttcaagcacgatcacggtggtgtgggaatctagagtgggagagattaagctgaagaaaaattttggggaaaggggtgatattctggggttgttagaaggagcatttgtcatatagaatgatgatggcctggatgtggttttgtatgaattgagaaactaaacggaagacacaaggtccaaataagagaaggagaaaaacaggcattaaaggattaagaattgggaggacacaggacatccaattagagagtgcccaagggggtccagtgtaattatttgcctggacaatgagttttggggctctattaggttgtcatataccaggccagattgatttaggtaaaaacaacactcttcatttaaaatatacagagtcctccttttttagcagtgagtaagttgagacctattcctgtcttcttatattaataagtaaaataaagcaaaatagaggtgaagtgttggtgtcatgaggggaacaggaagcagttcggtcctatttgcaaattgattttgggggggtaaagaaaactagtgtacctttgcctgtccaattaataagtagacacatgtagatggaggagccacagaggaagaagagaactttgtaaggcaaaactggaaatgtaaagggaaaagatgagagggagcaccaaaagaggtgtcttgcacccagactcagggatctagtgagagcagcagctgttagaggttgtaatggggattaatggggctactgggtagagggggaggttcaacttttatggtgtatgagaaagcgcatagtgtctacaagcaacctttcattgctattcataggattgggtataagtaaacaagaagggggggctaggaggagagtctgaagaacaaggggaaggtagccaaggatggagtgaaatgtagggcaaatgtcttaaaggaaatgagaggttctaagaggagggctagtggcttgtaacccacatggaagaggttacgaaaggatgatagaatggaatgagcctgtgaggctggaaggaggaattttccttggtccaagaaccatttgccttgtgtgggaagagtttgataggtggaagtttcagtgggagggtaggcgggagtgactgatgagaaggagaaaaactggccataagggacagaagttggaatgctagctgctcctttagctaccttatcagcataagctttgccctgagtgatgggatctgatgccttttgatggcgcttgcagtgaatgaccctagcttccttggaagtagagcagctttaagaagagtttttatgaagaaggcattaataatggaggaccctcgtatagtgaggaaacctctttcaggccatataacagaatggaggtggagaatatggaaggcatatttagagtcagtataaatactgacacacaatccttttgcaagagtgagggctcgagttaaggcaatgagttcggcttgctgagagggagtggagtggggcagagtggtagcctcaatgatagatgtgaaagatactatagcgtagcctgcctttgctggtgagtggtgattaggcctagtggaactgccatcaataaaccaagtgtgatcagagtgaggaacaggaaagaaggaaatatgggaaaatggagtgaatgctaggtggatcagagagatacagtcatggggatcaggtgtggtatcaggaataatgtgggaggccagattgaagtccaggccaggaacaatggtaattgtgggagactcaacaaagagtgagttcaactgaaggagccgggggagggggagagcggcagaaagtatatgcatcaggtgtgaggaagaaaatacattttgaaagttatgagaactgtagagagtgagttgatcatagtttgtgattttgagggcctttaaaagtattaaagcagtggcagctgccacacacagacatgagagccagcctaaaacagtaaggtcaatctgtttagacagaaaggctgcagggcactgtccaagctcttgtgtaaggattctgaccgcacagccttgtactttggctgtgtgtaatgaaaagggttgggatgagttagggagagctagtgtgggagtagcttctagggctgtttttaaggaacataaagaggagtggggaaaggatttaggatctatggggtcagctaggtttccttttgtgagtttatgtaatggtttagtcaggatggcaaaaccaggtatccaaaggtgaaagtacccaaccatgtctaggaaggaaaggatttgttgctttgtagaagggattggggtttgggagattagccggacacagatcaggagggagagcacttgtatttttatgaagaattatgccgataggtaacggatgaggaagaaatttgggctttggagggggatacacgatattcccttgagaatagatgttggaggagcaggagggtgtcctgttgggaagattcataggaggggctataaagtagaaggccatcaaaatattgaataaggtgacaagcagatggacagaaaagtaaattatgagaaagggcttgactgaagtaatggaggctgtccctgaagccttgtggcagtacagcccaggtaagttgctgagactgatgggtgtcagggtcagtccaagtgtaagtgaagagaggctggggtgaagagtgcaaaggaatagtaaagaaagcatcttcaagatccagaacagaataatgggttgtggagggaggtattgaggataggagagtatatgggtttggcaccacagagtggataggcaagacaatttggttgataagctgaagatcctggacaggctttagtcccttcaaagcctgttgtgggatgggatactggcattgagcaggataagggtaattaggttttaatgggatggtagggttgcgtgatcggtcaccaaggagggagtagaggtatcccatacttgtgggttaagatagggagtcaggaggggaggttgtgaaggaggctttgaactggggaaaagggtggcaatgaggtgtggctgtagcccaggaatagtcagggaagcagataatttagttaaaatgtctcaatttaataagggagctgggcaggtgggaataactaaaaaggagtgcataaaagaatgttgtccaagttggcaccagagttggggagttttaagaggtttagcagcctgaccatcaataaccacaacagttatggaggcaagggaaacaggcccttgaaaggaaagtaatatggagtgggtagcctccatattgattaagaaagggacagacttaccctccactgtaagagttacccaaagtgtctgtgatgatccaggaggcttctgaggtgatcaggcagtgtcagtcttcagctgctaagctgagaagatctgggaaggagtcagtcagagagccctgggccagagttccaggggctctgggagtggctgacgggcaagttggacagtccgatttccaatgcggtcccacacagatgggatacagtttaggaggaatcctgggctgtaggcattccttggcccagtggccagatttctagcacttgaagcaagatcctggaggaatgcctgaccacagtggtttaggtgttttgaagttcttgtgtgctggagatgtggctgaggtttttctcacagcagaggcaagtaattgcaactcagaaatacattgccacttggctgtctcttctctattattgtacaccttgaaggtgaggttaattaagtcctgttgtggggtttgagggccataatctaatttttgaagcttttttaatgttgggagtggattgggtaataaaatgcatattgagagtaagacagccttctggcccctctgaacctagggcagtaaaatgtctaagagttgttgccaaagggaccatggactgggctgcgttttcatatttgatgaaaaaaaaagagcctaaatgctaactaatttgggagaggtcagataaagtaaaaggaacattaatcttgactatgccttcagctcttgccacctctctaagaggaaattgttgggcaagtggaggagtgctagtcgtggaatgaaaccataagctggactgggtgtgaggaggggaggtgatagaaggattacagcgtaggggagtagaggctgaggaagaattgggacctggctcagcctggtgaggagtggcctggtgaggagcagcctggggaggaggagagaggttagatgggttcgtagaaaagaaggattcaaaggactcggagcttggtgaggagactgaaggaacagacaggagagaaagaagaaagatttgggacaagtcgcattgggagcagagactaggaagggagtgatgtgtaaagaatgcctggacatcaggcacctcagaccatttgcccattttatgacaaaaattatctaagtcttgtagggtggagaaatcaaaagtgccattttctggccatttggaacaattatcgagtttgtattggggccaaatggtgttgcagaagaaaataagatgcttaggttttaggtcaggtgagagttgaagaggttttaggttttttagaacacaggctaaggcagaagaaggaggaatggagggtggaaggctgcccataataaaaaggtaagtttagagaaaagagaggatagagacacagagagagggggtggtggtactcatcagccaggggaggtggtacttgccaccaaggtgatggatcaaggcagtcatccccacggtgatcagacacctctgaaatgtgggtgaataatcaggcaggtgtccctgcagtgattagacaccaaggggagactgtcttcccgagtccgtgaccggtgctggagttttgagttcacagataaaacacatctcctctgtctctaccagaaagggaaaggaactgaaattaaggaagggagagattgaagggtggagagatagcaagagagttggaaaagagaataaaaagaggccacttactcaatttaaaattggtgagatgttccttgggctgatctgaggacccaaggttgtaggtggatctcctcacggaatgagggtgaggacaggggactggtctccagaaggagttcccgagtcctggatcttcagcaccaaatgtcatgtgcatccatgtgaagagagtccaccaacaggctttgtgttatcaataaagctttttaatcaccttggtgcaggtgggctgagtctgaaaaaggagtcagcaaagagagataggggtgggtcagttttataagatttgggtaggtagtggaaagttacagttagaggtggttatctcttgagggcagaggtgggggtcacaaggtgctgggtggggaaatcctgagacttatcatccagggaaggagtgtcacaaggtcgattgatcagttggggtggggcaggaacaaatcgcatggtggaatgtcatcagttaaggcaggaactcactatttcacttcttttgtggttcttcagtttcttcaggccatctggatgtacacgtgaaggttacggggatatatgatggcttagcttgggctcagaggcctgacactaacctcctgcagaagccacaaaaggttattacacataaaccatggtttccacaggcaggcactcttgatgtggaaaattgggatagagcaggattaaaacaagctcatcaaaaaggtcttaaagttgattcttcagttttctccacttggagtttagttcatactgtacttctgccattatctccttattattctgcggaacagcaggctgaatctaaaaattggaaagaatttgttgtcctactcacagctccaattgaatataaaaaacaggagagggaggataaaaattggcctataccgcctcctccagatgcagaaacatctgtaccatctccttcagtggcagaaatagagatcccagtacaaagaattttatgctctgctgtcatagctggagagcccttaggaccttgtgcttttcctatttctgtaaggcctgatccaaataatccacagcagtttattcatgaacactctccactagaatttaagttgttgaaggaattaaaaactagtgtggtcaataatggagtacaaagccaatggttcctggaggaaggaatgctagacatagaactttgggagcaagtggggagaaatcttaaacaacaccaggcacaaaggcatcaggtcccagtaaaatcttttatgttaggggctttgagtagagcagccctggttgttacacacaaaagagcctaaaaagggaaaggaggaggaaatgtcacctgccttatcacctccccttccctcagtgccaatatcactgggccaaaataacaaagaggaaatggaggtcttacctaagcttcctcctccaatagataggaagaaggacagaggatacgctacagctatcagtccctgtcttaagcaggcagcattagaaggagagctcttagccgggtgcagtggctcatgcctataatcccagcactttgggaggccgaggcaggcagatcatgaggtcaggagatccagaccatcctagctaacatggtgaaaccccgtctccactaaaaatacaaaaaattagccaggcatgttggtgggcacctgtagccccagctacttgggaggctgaggcaggagaatggcatgaacccaggaggtggagcttggagctttcagtgacctgagattgcaccactgcactacagcctgggcaacagagcaagactccatctaaaaaaagaagaagaaggagagctcttaacctgctcagtaatgcaaaatcggcaaggcaatcaggtgtatgtttataaaaagataagaaaaaggcattagaagccaaaaccacgtggccaagcaggcagtgggcaggagaaaatgctcagaggcagaaaagctcacagcgacaaagccaacaaggtctgcccaggacggcagcatccctctggcaaaggagcaagggagcagcacagacacaggcaaagcctaaacaagtacaatgtggccacctcccaggacctgcaccactgccctctggctctgtgggcagcccattgcaaaatttcatgtgttacatctcaggctatgattctctgctaagatgtaagtaaaatgtaagaatttgaaaagcatcttttctaataatggccactattgtcatctctctcctatccctgatgtagctttccaaattcaatttaagtaaaacagtaacctttgaagggaaagagattacagagggcccatgaattagttgaagagtaattaaaagctaggcatgtaaaaccacacattacgctttaaagaagaaatttaaacctaattaaatgatatttgttaaattagaaggtaaaaatgttgtgccctgttgggaacaggcccccaaatctggccataaactggccccaaaacaggccataaacaaaatctctgcagcaccatgacatgtttgtgatggccatgatgcccaccttgaaggttgttggtttactggaatgagggcaaggaacacctggcccacccagggcagaaaattccttaaaggcattcccaaaccactaatgatagcatgagcaatctgtgccttaaggacatgttcctgctgcagacagctagccagagcccatccctttgttttggcccatccctttgtttcccataaggaatgctttcagttaatctatgatctatagaaacgatgcttatcactggcttgctgtcaataaatatgggagtaaaactctgttcagggctttcagctcagaaagccataagccccctgatttcccacttcccaccctttatttctgtgtgtgtgtcttgaattcctctagcgcctctgggttatggtctccacaaccacgctggtcttggcagtgcccttctcagaaagtgaaaaagagttgtatgtaagtgtagtgaaaacataagcatgaatcactgtcttaacccactgattagatagtctttgatttgtacttgctaaaagagtcctaaattgagttcctcagctagtgagtcactgttttcaagactgtttgccagattgaagtccataaacttggtcagcccgaaaactcaattacaagatctaagctattctgcctgtggctttaagcacatggttaaagtatattatttaagtctctccttctagatatgctttcagattttctttttaaacttcttgttacttatttcagctttccatattgataattaatgcagtcaattgctcagttatgactgtgatatcatcaggattcctttaagtaaaaggcaattcaaagcggtattgcactcccccatacctaatgctttaacactgtttactgatgggtctggtaaacatggaaaagctgcagtctagtagagaccacataattcaatcactcgatctgagttcactagcactcagagagctaaggttactctgtttatttattaaagaatttttacaaccttaagctcactctggactttccagccttatgtggcaaatgtagccatcaatttatggggtcaagacttacttacagcatgggatatgaggcttacaaatgagactttgataacccaggattttaaatgttgaagaacacgggatatcagagtgaaaaaggtttagggaaaattctgacaagggaaaattctaacctgatatcaataactggaaagacaggttaaaccctgcaaggggatacattgacattttttcttcctcacttgctcttttctgctgtctgaatatgggcatgagggcaagagtcattttagaccaccaagtgaccttgaggatagaagccttatactagaggtggtgggaaagaaaaaacagaaggactcataaagaaaaaaataataaacctcagtattaagatggaaaaattcccccaattggtctataggttgaacttcatctctattaaatttcagctatgtttttgcagaatttgatatgctgatcataaaatttatatgaaaatgcaagagacacagaatagtcaaaactttgaaaagaagaaagttggaggacttacacttgttgattttaaggctttttacaaagctataataatcaagacaatgtgttactgacataatgatagacatattgatcaatatagacaatggatgaatggagtagaattgacagtctagaaataaaaccttatatatatggtcaatttatttctttatgtattctgtcatccagaatacataaagaacaccttcaactcaataacaacaataccaacaagggtgccaagaccaatcaatggaggaaataatagtcttttcaagaaattttgctgagacaactaagtatttatatgcaaaataatgagtttgaatggctaccatatacaaaaattaactcaaatggactatattaggtcagtgcaacagtaattgcagtttaccaccattacttgttttttttttttggtttttttttttgagacagagtcttgctctgtcacccagaccagagtgcagtggcatgatctcagctcactgcaagctccacttcctgagttcacgccattctccttcctcagcctcctgagtagctgggactacaggcatctgggtaatttttttgtatttttagtggagatggagtttcaccatgttagccaggatggtctcaatctcttgacctcgtgatctgcccacctcagcctcccaaagtgctgggattacaggcatgagccaccacgcctggcctaccattacttttaatggcaaaaatgcagttacttttgcaccaccctaatagaactaaatgtaagagctaaaactacaaaactgttagaagaaagcataggagcaaatcttaatgacatgagagttggcaattgttttttagatatgacaccaaaagcatcaaggacaaaagaaaaaaatggataaattggacttcctccaaattaagagaacttttgtcctgcaagcaatactattaagaaagtgaaaagacaagtcacaaaatgggagaacatttttgcacataatatatttaataataggctgacatccagaatacataaatacctacaactcaataccaaaaagacagcccaatttaaaaatgggccaaggatatgaataaacatttctctaaagaagatacaaaaatggtcaatatgcacatgaaaagatgctcaatatcaatatctattaggaaaatacaaattaaaacacaaaatataaaacacaagatatcaatttacactcaccaggatggctgttatcaaaaagacagataacaagtattggcaaggatttggggaaattgtaaccttcatacattgctggtaggaatataaaatttgcagcaggtttggaaaacagtttagcagtttctcaaaaagcctgggcatggtggctcatgcctacaatcccagtgctttagggagctgaggtgagaggattgcttgagcccaggagttggagaccagcctgagtaacacagtgagacctcttttctaccaaaaagaagagagttaaacatagggtaccatataagccagcaatccatctcctagatatgtacccaagaaagttgaaaacatatactgacacaaaaacttacatatgaatcttcatattagccttataataatagccaaaaagtagaaacaacccaaatacccatcaactaattaaaatatggtgtatctatacatattatttggccataaaaggaagtactgatacatgtcataacacaaatgaaccttggaagcactatgatctctgtattagtcagctcttgtattgctataaagaactacctgagactgggtaacttataaagaaaaaggcttaattgagtcacagttccacaggctgcacagggatcatggcccaggagacctcaggaaacacagttatgatggaaggaagagagtgaaggaggaggtgctacatacttttaaaccaccagatcttgtgagaagtcactcactatcatgagaacagcaagggagaagtccacccccatgatccagtcagccccagccaggccccaactccaatattggggattacaattccacatgagatttgggtggggacactaatccaaacaatatcattctgccccagcccctcccaaatcctgtgtccttctcacattggaagatacaatcatcccttctcaacagtttcatttcagtattaactcaaaaatccaaagtctcatctgagacaagacaagtcccttccacctatgagcctataagatcaaaaagaagttagttacttccaagatacaatggaggtacaggcattgggcaaatatatccattccaaaagggaaaaattagccaaaacaaaggggccacaggccccacgcaagtccaaaatcaagcagggaaatcattaaatcttaaagcttcaaaatgatatcctttgactccatgtctcacatccaggccacaccaatgcaaggagtgtgctcccaaggccttgggcagctctaccctgttgctctacagggtatagcccccatggctgctttcacaggctggcattgagtgcctccagcttttccaggtacacagtgcaagctgttagtggatctaccattctagggtctggaagattgtggccctcttctcatagctccagtagacagtgccccagtggggaatctgtatgggggctgcaaccccacatttctcctctgcactgcccaatagaggttctccatgagggctccattcctgtagcatacttctacctggacatccaggtgttttcatacatcctctaaaatctaggtaggggctcccaagccttaactcttgccctctgcacatccgcaggcttaataccacatggaaaccaccaatgcttatggcttgcaccctatgaagcagtagtctgagacatatctgggcccttttggccatggctgggatgcagggaacagtgtcctgaagtggcacagggcagcggggccatgggcctggcccatgaaaccttctttcctcctaggcctccagacctgtgatgggagggtctgcctcgacggtctctagaatgtgtttgaggcatattcctcattgtcttggctattaatatttggctcctctttacttatgcaaatttctacagcctgattaattcctttccaaaaaaatggggttttcttttctactacatggtcaggtcacaaattttccaaacttttacgcttccctttgaaatgtaagttccagttgcaggtcatttctttgatcacaaatataagcatatatttgtagaatcagccaggccacatcttgaatgttttgctgcttagaaactgcttccaccagataccctaaatcattgctatcaggttcaaaattctacatatctctagggcaagggcacaatgcctccaagacctttgctaatgcataagaaaattgacctttgctccagttcccaataagttccccatcttcatctgaggtctccttagcctggacttcattgtccatatcagtatcagcattttcatcacaataatttaactagtctctaagaagttccaaactttcccttatcttcctatcttcttctgagccctccaaactgctccaacctctgcccattacccgggttccaaagctgcttccacattttcggtatctttatagcaatgctccattcctgataccaattttctgtattagtctcttctcgcactcctgtaaagaactacctgagactgggtaatttataaagaaaagaggtttaattgactcacagttccacaagctgtataggaagcatggttcagaaggccacaggaaacttacaatcatggaggaaggcgaagagaaagaaggcacgtcttacgtggctggagtaggaggaagagagtgaagggggaggtgttacacacttttaaacaaccagatcttgtgagaactcactcactatcatgagaacagcaagggagaggtctgcctccatgatccaatcacctcctaccaggctcctcctccaacattggggattatgatttgacatgagatttgggtagggacacaactccaaaccatatcaatcccatttatatgaaatgtccacaatagataaatctatagagacataaaatagattggtgcttgcctagtgctggacgtgacaggagggtgtgagtaaaagaggcaatggagtgataggtacagggtttctttttggggtgatgaaaatattataaaattagattgtggttatagttgtataactcttgaatatcctaaaaatatattgaattttccatttccattttaaatgggtgaatcttatggtatgtgaattatatctcaataaaactgcaaaaaatgcacaatttgcaattgcaaaaatatggaaccagtccaaatgcccatcaatgagtggataaaggaactgtggtatatatatatatatatatatatatatatatatatatatatatatatatatatatacacacacacacacaccatggaatactactcagccataaaagggaataaaacaatggcattctcagcaacctggatggaattggagaccattattctaagtgaaataactcagtaatggaaaaccgaatatcatacattctcactcataagtgggagctaagctatgaggatgcaaaggcataagaatgatataatggactttgggaactcagggaaagggtgagagaggggtgaggaataaaaggctacccattgggtacagtgtacactgttcaagtgatggctgcaccaaaatctcagaaatcaccactaaagaacttatttacataaccaaataccacctgtttctcaaaaacctattgaaattaattaatttttaaaaactgctgaaatcaatagtgaaaggatggactattcaataatgacacagttaattgaatatcatattttaaaaattagatccttacctcacactataacataacaataaattccaggtgaattatagaccaaatatgaaaagcaaaattttaatattttagaagacaatttttatgaccttaagttagaaaatgatttttaaaaacaggatgcaaaaacactaatcataaagagatattttaggccaagcatggtggctcacacctgtaatcctagtactttgggaagctgaggcaggtggatcacttgaggtcaggagttcaagacaagcctggccaatagggtgaaacatgtctctactaaaaatacaaaaattagctggaaatcgctcgaacccaggaggcagaggttgcagtgagctgagattgtgccactgcactccagcctgggtgacagagagagactccacctcaaaaaaataaataaataaaaataaagagagattttaataaggtgcattaaaataaaaaactatccatcaaagacaccatgaataaagttaaaataggccacaatgagaatatatttgccatgaattttttctttttttttgagatggagtcttgctctgtcacccaggctggagtgcagtggtgcaatctcggcttactgcaaacttcacctcccaggttcaagcaattctcctgcctcagcctcctgagtagctgggattacaggtgtgtgccaccatgcctggctaatttttgtattttttgtagacacggggtttcaccatgttggtcaggctgagctcaaacccctgacctcgtgatccaccttcctcagcctcccaaagtgctgggattacaggcatgagccaccgtgcctggcctaccatgaatatttttttaaaggtagcatccagaattaataatcttctccaacaaatttcattagtagtcagggaactgcaaattaaaatcaaagtaaaatactactttccactcattagactaaaatccattcaagtctgataatacctagtactgagttggagtaatagaaactgctaatgggacagttagttggtcatcactttggagagaaattagtcagtatctagtaaaagttagtgatacaccttccattttcatctgttctgtgctgctaccaaagaatacctgagactaggtaatttataaataatagaaatgtatttctaatggttctagaggctgagaagtccaagattgaagggccagcctctgcagagagccttcttgctgtgtcatgccatggcagaagggcaaagagagggcaagagagagcaaaagcaaattcacagcatcaatcccttttataatcagcattactctattaatgagggcaagaccctcatggcctaatcacctctaaaaggtcacacctcttaatactattgcaatggtaattaagtttctaatacatactttttgggagacattttcaaactatagcacctaccctatagcccaacatttctactcctaggagtatgccctagagaaattctgcataaatatctaaagagaggccattgttgcattgttaggtactggaaaattggaatcaattactatgtctaccagcagcagaagatggctttttaaaagttttggtttattcatgaaatggaatattgcataaagtatgctccatctcaccagatgaaaacatttttcactaggactatttcaaaagtagtcttatcactgggcttctctattatgcataaaaattttaagtgaacatgttctttgacctagtactcctacttttaggaatttgcccaaaagggacaattatactactgggataaatctttgaatcataaagtaagttgtaaatggtacaagcagtatgtcttatttttatttaaagcacattaacaatattacacatatagtaaaaaataaataaataaaacatgtgaataataaacacccaatttagaacaagtgttgacagtggagagggaaagagagagaaagaaggagaaatggggagtgggagcgggtacacaaggaaattttagttgcagctccaaatttttactttttacacaatgaagcgaatatggcaaaataagatttgttaaagttgggcagcaggtacacagatattctatcattatcctttgaatatttctgtagatttaagttgtccattaaaaaaataaaatacacacataatttttaagattagttttttctatttcctggccttcgcatgcactgttaactttacctggaattctttatgcagtaattaagagcaaaggtgtagagcaagactgcttgagcttggatcccagcactgagttgatttagggagaataacttaatctcttaatcccaagagaaaatatgatataatagttttgagctcataaagttttcataagcattaaatgtgacctatatatgtaaagcaatctaacagtgcctatagtatttataagtgtctgcattaccaaattcatcattatcatggcatgtcatgtcaccatccactacattaccatcactgtcaccatcatcatcatcaccaccaccatcatcattaactccctttgtctagtcaattcatatttgttcttcgtattttagatacctgttaaaatattttttcaaagatgtctactctgattcttcagtacaaatttgatttaataagatcctatcattttgtccaaatacttataaaaatttgtagttctatatttaatgtgttttgtttgtttaacatctctctcctacattgtgttaagttttttaaagagaaggtaagggttaaagagagacatagagagagaaagagagacagagagagagagagagcggttctacagcaatacaggtatattagaaaaacctgcaaaggtggggaccagcttaatgccagagccccccactgcttataggctggggtacttataggtctgggggtacttataggcctgggtgggtggggtctgagcagtatggcttgctgcccaagaagatgttgataagacgttcccatgatgaggcagtttggtccttgcttccatagagtgtgatgcttcttgcactttttcccagcagaatgtggtagggatgttccttcaggtgggcctttgcctggcagggtatgataaggatgttcctgtgccttggaatcaggtagttagacaggatgtttctcacagcctgaacccccatggaatgtttcactttgaccagggtctgcgaaatagcagggggcttacaaaatggtgtagtttggactaacaccttggaacacaaaagtttcttggggccaaggctggcgtattagtctgttttcatgctgctagtaaagacatacctgagactgggtaatttataaagagaaaagaggtttaatggactcacaattccacatggctggaggcctcacaatcatgagggaggcaaaggaggagcaaaggcacgtcttacatggtggtaggcaagagaacgtgtgcaggggaactgccctttataaaaccatcagatcttgtgatacttattcactatcaaaagaacagcacgggaaaaatctgcctccatgattcaattacctcccaccagattcctcccatgacatgtggtaattatgggaactacaattcaagatgaaatttgggtggggacacagtcaaaccatatcagctgggtatgttttattcacctttttatacccattgtcatgtcttctggacaaacaatggatgtaaaatggtatagactcctgagtactcatttgttgaatgacaaatctatgaaccatttgaccagtatgcagcagccattaaaattatgtttatgaataatttacagcatggaaaaatttggggttgctagtagaaaaacaaaaaggtacaaaaggatatatataataagcctacaatgccatataaacaatactaacagcaaaaacaaacctataaattgggggaagatggggcagatagaagtaacctaaaatactaacatgttgttttggggtcatgaaattataaatgattatgcaccccttaatttttactttctatgtttgatttttctatggtaaatgcatttttattgaggtggaattcacataacatgaaatgaaaaatttagtggcatttattatattcacaatattgtacaaccactagctctacttccaaaacattttcatcactccaaaataaaaccttgtacccattaagcagttactccccattatttcctctcttagctcctagcaaccaccaacctgctttctgtctctagggatttatttattctggatattccataaaaatggaggcacaatatgtaccttttatgtctggcttctttcaccaagcatgtttttgaggctaatccacattgcagcatgtatcagtacttcatttctttttatgaataactgtatacagaccacaatttgttatccattttttggtttatggacatttgggttgtttccatctctcaactattgtgaatagtgctgctatgtatatttgtgtacaagaatttggttacctattttcaattcttttatgtatatatctaagatgaaattgcagggttatatgctaatcctatgtttagcatttttttttaggaaccattaaactgttttccaaatctgatgccccattttatattcctactagcaatgtaagcaagttccaatttctccatatcctcaacaacacttgttattttctatttttgttatagccattctaatgagtgtaaagtgatatatcattgtggttttctttgcattttccttatgaacattgatgttgagtaccttttcatgtactttttggtcatttatatatcatctttggagaaatgcctcttcgtgtatgttttgcccattttaaaactagattgtctttgttgttgacatgcatgcattctttaaatattctgcatactaggcccttatcagatatatgatttgcaaatgttttttctcattttactggctgtcttttcactttattgataatgtcctttgatgcccaaaagttgtttattttgatgaagcatatttatcaatttatttcttttattgctcatgcttttgatgtcacctctaagaatttataaccaaatcagaggtaatgaaggtttacccctctattttcttctaagagttttatagttttgactcatttacttaggtcgctgattcatttttagttaatttttgcatatgatgtgaggaagaggtccaactttactcatttgcatgtggatattcagctgtgccagcaccatttgtgaagagtctatcatctcctcatttaataatagtattgacacctttgttgaaagtcaattgataataaatgtatgagtttatttctggaatctaaattctattccattgatctacatgtctatccttgtatcagtatcacactatcttgattactgtagatttgtagtaagttttgaaactagaaagtgtgagtactgcaatattcttctttttcttttttaaagattgtcagggcctcttgcaatttaatagggatatgaggattgacttttctattctacaaaattaaaattttgttagagattgcattgacactgtaggtagctttcagtaacattgccatctcaacaattttaagtattctaatacatgaatatgagctttctttctctttatttaggtcttctttaatttctttcagcagtgttttgtagttttggggtacaagtctttcacctttaaattttggtgaaatttattcctaggtattgcatttttttatgctattgtaaataaaattattttctcaatttcctgttggatgttcattgcaggtgtatagaaactcaactgattctttgtgttgatcttatgctgagaccagctcagttggggagaccctaacctagaagcactagaggaattaaagacacaaacacagaaatatagaggtgtaaagtgggaaatcaggcgtctcacagccttcagagctgagagcttcaaacagagatttacccacatatttattaacagcaagccagtcattagcattgtttctatagatattagattaactaaaagtatcccttatgggaaacgaagggaagggctgaaataaagggatgggttgggctagttatctgcagcaggagcatgtccttaagtcatagatcactcatgctattgtttgtggtttaagaatgcctttaagcggttttctgccctgtgtgggacaggtgttccttgccctcattccggtaagcccacaaccttccagcgtgggcattatggccatcatgaacatgtcacggtgctgcagcggtttttatggccagttttggggccagtttatggccagattttggggggcctgttcccaacaatcttataccttgcaattttgctgaatttgcttgttaactttgatagtttttttgaggattatttgggattttctacatatcatgtcatctgtgaataaagatagttttgcttctttctttctcatttggatgccttttatttccttttcttgcctaatttccctggctagaacttccagtatgatgttgaataaccatggtgaaatgggcattcttgtctttttcctgatgttagagagaaatttttcagtctttaaccattgagtataatgttagctgtgggttttttacaaatatcttttatcatgttgaggaagttccttcctactcctacttcttggagtgtttttgatataaagggtatttaatttgtcaaatgctttttctgtgtcagttgagattatcatgtgagattttttttccttcattctattagtgttgatgttacattggttgattttttatgttgtactacatttgcattctttatataaatttcacttggtcatggtgtataacccttttaatatgccattggatttagtttgctagtattttgtttagagtttttgcatctatattcataagcaatatcagtccacaggttttttgtggtttatttgtctggctttgctataatggtaatgctgtcttcttagaatgaatgagggagtgttttctcctctttcattttttaaacgtttgagaaggagtgatattaatttttctttaaatgtttggtagaacttaccagtgaagccgtctggttcttaacatttttctgtgttgggaggtttctgattaccaatttgatctctttaatttttacagatcttttcagattttctatttcttcttgagtaactttttagcaatttatgtattttagaaatttgttcatttaatctaggttatttaatttattggtgtgcattttttcatagtattatcttataatcttttaatttttgtaaagttgataatgtccccaccttacctgatcttagttatttgtgtcttctctgtattctttttgtcttcttcttctgtcttagcatagctaaaggtttgtcaactttgttgatcttttaaagagtcaacttttgctttcagcatgcattactttttaaatagaaatatatacacctaagttgcattacaaaggagttgtcctccacacacttattctttcccaccatcagaggtttatggtccccgcaaaagtcaccatcagttgggctcaactccaatcagtcatggtaggtcagggtccatctcattgtctccatcactcatgcccacccagggtaagtctaatcatgttcaccaatcagaacctctgccacatcagctctgtgggtttcctctcatgccatctgtaccaacaatgagcacagtctgggtttcctgatgttttctatagcatggtgcccctccctgggacacctcagaagccacaatgatattcattaaacttcttcctgcaagtactccctctattgctccttctactcaccaagcttagtgtcagggaatatgctggtggggagtatgaatcttagcttctcactcccagactcggctcccaacctgctgttgccaagtcttggggacatctataaatgccttctaaatacctgtcttggcctatccccagccacagattcctccctagagcaggctacctctgaggcatctatactgagatcttaatcacagagacatttaaaacatctaggctacaaaagaattcctactatagggttcaaatgaatttctttccgtcacttgagacagctttttagcaagtacatgtattaaagattctgatttccccttttttctcctacagtttgtttggcctaaaggtatgacatctaatctgctgcatttacactctaagtcaaaattaccattttgttcttttaatttctatttctaatcatacattcttgtctactcctggttcatctggagacaaagttgaacttagaagatggaggagaaattcttatctgccctctgctagttgacacttcctttccaagaatcatttgcagttgctgggctttcttgctgtgactctatgccctgttgtgttactttttcatttgtgacaaaaacagtggtaatagtttgcttcatttttattatgaagacttgaccaggataggtaggaacataattactgctttttctgtgggcatcatattggtccagatcatgtttaaccagaattgaagatgtaaaatcctagaactcactaatctattttagtaggtcacaggaagcatgcaaaccataaaaaccgcaatgaaccaaaagcatctgtgttgacaagaggcaagaatttctctattttctaaaggcactaactgaacaaatctattgcccattacttaggaaattgctaagggcatcgttaaagtacttcaggctgttgaaaaaccttttctgtcttcttgccccaccaccaattctctctagctatgctttctctcacatgttcttgccatccatggagtggcagagaggttctgagtacaactctaactttcagtttcaatggcctaatccccaactcaactgctgaccttgagtgtaaaaataaacaagatcttaaacatcttagggccagcattctgggtcttcttttgttatttggggagcataaactattctcatatcattggcttgcagaaaaattgagcttctcctcttccttgccccatgtcaccttgaggtgaccacagccctgccttctatgtaatcctgcttggtcagcaggcacatcagagctcagtggcttgtgacatactttccttcaagcctgctcgaagggccatactcatcattgagactgggaaccttagaaaccatgaacccagtgccaatgggtagatacagaattctcaaactcatgaaaaaacatcctttttaactctctccgtgtgcataaagaattctaagatgtactgatcaagattcccaattttctaactatctattaatatatggacgaggtaagaagaaagttgcaagaaaaaaatttgtttgacttgacggttgtgtggttatttgccacactcccccagatccactctgagtcccaggatgctgattttaggggctacattgcctagactgtccattattccctcttcccatctggttcagtcactgggaagcactggtaggaggtcagagtgggagaaggaggttaggatactttctgcccctgctgtcctactgctttgctgaacttctagcagtggctgagccatcaacctgcagctctcaattccagctgtctgtagcactcaagtggtattgtttattcttttgatccttctagctgttaaggaagaaaaaaataattttttcctcaatgctcataagttcttggaatggacccctgtaacaaaagacagattaacacgagaaaagtttattaacgtacatattttatacgtacataggagctatccagggaatgaataattcttaaaaaggtgactttgaattccagctcatatagcatcttcaacaaagttcagtaacattttagagatatgacaagacaaagaaaatgaactttgagcctctagggacagtgacttgtaggaaggcaaaaggaataaatggaggtaaaggctggttagtaatacttgttaatgaagattcctctggtgccatctccaggtccacaaggatttaaatttgtcttcagtggtgaacctttgttcaccctggcagaaggtgtggaggggggtgcagatccgttttgtctttgtaagtctatatcctgcttttagacaaataaagggagggaaaagagctttccttcatctgcttcttaattgccttcagctcaacaatccttatgcaaaagaggtacattttagggtgtcaaattctggtctcccacaaagcatagggatgacagaccacctcaccatccctgttgcttcttttaagcctgctcacccctccaaaaatattttcattctatactgtctcttcaaaatctcagcggagggtgccctctgttatcctgccctctgtgtcagtataagccaaaggtttgaatcctggctctgcaactatctacctctgtgcctctccttgtttatgaaattacagggctggagacaaagatcacaatgtgaagacaaaattggagagcggtcctaatcagccagagcaaaatttctggctcttgctcttccccatcctgggttgaatcataggaacaggtggcaagatgccagggtcaggagattccagaagtggcagcaagctcagtgttaccaggtcagggatgacctgtcttattattgaaatctcagagatatgctccaattccggcccagagacacattgagagacaactggggaacttgctatgttcctgaacaggcaatgagctgtcttccaagaaaaaacctgagacccttcaagtctcaggtcttacttagcacatataccaggtcttacacaggacacatggttacaactgactgaaatctgggctgggtgtaggagctcacacctgtaatcccagcccttcaggaggctgaggcaggcagattgcctgagcccaggagttcgagaccagcccgggcaacatgacaaaaccccatctctacaaaaaatagtcaggcatggtggcatgcacctgtagtctcagctacttgggaggctgagatgagaggattgcttgaggttgagactgcagtgaagcatgatcatgccaccgcactccagcctaggcaacagagcaagatcttgtcgcaaaagaaagcaaaaacacaacataacacaacaacaacaacaacaacaacaacagcaaaaaagccaacttcttgaaatctggaaaggacacctggactgccctgagcatttgattgttgttggctctagcagtggatgcatccttcaacctctggcactctgcagggctcagactgttctgttctgtttgttacctgtggagtgcctgccagaccctgctctagctgctttaggtccatttaccctcatagacccccagtcttgttattcatatttcatatttgggaaatggaaacttagaaacttgccaagtccacagcatgagatcctgcctccggtgtctgctggattccagaaagtgccaggggccaacttagatgacaccatgttctctgcacaatcttaggaatgctcctagtctgatgtccccattgcaaaatttacattatcttttaacaaaacgtctttccaaggaggggcatttaaaataactgaggttcttcttgctaaggacgttcctgacacaagagataatttagcatttccttttcattaaaaagtttgaaatcctgtaatttgtgataatgtggatgaacctagaggatgttaagtgaaataagccacacacagatagacaaataccacgtgatctcactcttatgtggaatttttttttaaataagttgcttagccgggcatgatggcacacacctgtaatcctagctactcaggaggctgaggtgggaggatggcttgaactcagaaggtggaggtagcagtgagctgagactgtgccagtgcactccggtctgggtgacagaatgaaacccaatttaaaaaaaaaaaaaaagttgctatcttagaaaaagacagtagagcagtggttaccagagactggggaggaaagagaggaggtgagaatgggcagcagttgatcaacgggtacaaagttaccatgagataggagaaacaagtgctggtgctctgctccaagtagggtgacggtagttaataatgaattctgtatatataaatagctagaagagagggttttcaatatcattattatttcaaaagaaatgataaatgtttcagaggatggatatgtaattaccctgatttgatcattgcacaatgtatacatgtagcaaaacatcacattgtgtcccataaatatatacaattattatgtgaattaaataaaaaaaaattttaaagtcttatctaaatgaaatttctaaccagattctgaatccatgataccactgaaaccagcacacatgatcgcagtaaaacctcattatacttcctccactatcaccaataccctttattctctggaacatgaaacattctgttgtgctcatatcatgcaaattatcactagtaggagagcagagagtggaaatgttccaggtataaagacccacaagataaagaagctcagagtcgttagaaacaggagcagatgtacagggtttgcctgactcacactcaaggttgcataagcaagatttcaaaattaatcctattctggagacctcaacccaatgtacaatgttcctgactggaaaagaagaactatatttttctgattttttttttcaaatctttaccattagttgccctgtatctccgccttcactttctgcaggaaactttatttcctacttctgcatgccaagtttctacctctagatctgtttggttcagttgctgagaagcctgacataccaggactgcctgagacaagccacaagctggtgagttgtaggcattttttccattactttctgattcataggctcaacgcacctcaaagctggaaatgccgggtctgggtacaccctggggaactgcaaagcctgcacacttgggggaaatgatcaagatgagaggcaggggtggggatggcatgtgcaccaggagatgttagagaaaccctgaggaagagcagcgtgcagcaggtgatgggggagagtgggcagcaagcgaggccaggacagccactctgctcagtcaccagtccacacacccaggggctcactctgcccctctgagcacccaaggacgttaaagagctggaactgttagtctaaatataggaccatccaagctctgaaccaaaatgtgtcccttgcctcaactcaggagatccacagaggcagaagtaaggaatttattttctgaaagatagatttctatcagttctgggtgacatgttctgacacttgaaatgacacctaggacagcacatttcaggcatcttgctcattgttcactgtagtagaagctacatgctagccagttgtaaaaatgaaattaagtaatgtgtgcacagcatttaacatagcatctgagcttcaggagcactcaattaatgaccacagttgtgattctttaggcagatgcatttttttccaactttgatcagaggtcttatttagcttctccagatttcaagaatctggctcagtgatatgaaatacaagacttgtgaaaagtgtcaattgcaagagaaatggaaggataaagtatacaggtgggtggaaaagaaattcacagtcactgccagaaaaaaaattcttgagaatcaagtcctgatgatgttagggcttatagttcttattataaagagttttatgtactcattcagtgaacatttattggtgcctcctttagccaggtactatcataagagctgaaaataaaagcataatccagtccttgatcttgaggaacatgctgtgtgtagcagataacataataagtgcttatctagatgcatgcagtgttatgtgataagagtaatatgacagaggatacagattaggcttcacagagaagggggatttgagcaggaggtattgaagggtgaatagaagctcaccaatcattttgggcagaggggcaaggacctgcaaaaccactgaagcatgaaggaaatggtgagtttagggaaaatgaagagaagatggctgtgactgaagcacaggatttgggattggagaagggactggaggtgaggctgagaagaggcaaactcagaaaagatgttgtgctgggcagtctggacattatctttgaagcccaccacatataagtcatagggctactggaggttttaagctaaaagtgactattcaatttcaacttaagagaagataggttgagagggaacatggcttgagatgagccatgagcaaaggaaagactacaacaaagccaggagtgaggagtgtgtgaagcaagaaagtgacagttgaaagcagtgcagaggggatgaatctgagaggcatctatgaggtggaactcaaatgacatgataataatacagggcatttctctgtgtcagatgctgtcctaagtccttactccattgatcttcacagcaactcagcatagttaatattttatgcataaagaaatcggcacttgaaggagtaattggccccagattacactgcctataaggattcaaatccaggtttgtttggctccaaaaactggctcctaattttcagaaggagaagcgacccagggcaatgcccaattttgcttcttaggcaatggaggaatccacaatcggaaggagttttcagcagtgccccatttggggtgggttgaatttgaggtccctgcatgatacccactttgctcacttcagtgcctaaaactgagtatggttcatagtaggtgttcaataagtgttgatgcagtgaatacatgcatggggagatatgcatcaggcaatgggaaattcaactctaaggcttaggggaaagctggagcttgaagacagagctttagaaaacagtagcatagaagggagtaggaaccatgagtttagacaatacaattcaggaagaactttgtagcaaggataaagaggcaaaaaattaaagaggtgagagctaagtgtggtgcctggggaatcttaaggtgtgggcacggggaggagatgccagcaaagaacatgaataaaaagcggtagcacagcccctcccatctggaagccaaaaagaattgtaaatggaggaagttagcagaaggatcaaatacttgaagagggtggaattggaataaaaccagggcatttgaaaaattgggttgtcactgcaatcttaacaagagaagttttggcaggatgatggaggcagaaagctgagagaatcatcagttagaacgtttttgacttcagagaacagaaaatgcagttcataatggctttaaaacaggggcttgtttttctcccagcaatttgagaggccaaggcgggtgcatcaggaggtcaagagaccgagaccatcctggccaacatggtgaatccccatctctactaaaaatacaaaaattagcggggcatggtggtgcacgcctatagtcccatctactcaggaggctgaggcaggagaatcacttgaacccaggaggtggaggttgcagtgagctgagatcatggccactgcactatagcctggagacacagcgagactccgtctccaaaaaaaaaaaaaaagaaggcagaaggtgaatagttcaagggtgggtttaggactcagtgataataggattctgcctggcttctcatggttctctaggtcttccattcatggcaccatgccctcactaggcatgctgccagagcaggaggggcaggtggagggttctcttgtgtctgtcttatcagggaagaagagctttctcagaagcccccagcagactcccttttcatattatggtccagcaatgagtcacagacctatgcaccacctgcaaaggagccagagaaaacaaacgcccagcgcttttagcctgaaaatgagaatctggtttgctggggaagataaagggtgtcggaaaatggctgttgggtaaatcattgatgtctgccactaggaatgaaaggcaaatcaggaactggcacacatgctttcagggagatggctgcaagggagagggcaaagactgggaagttgcttatgtggtgccagactatttggaagatcatggattgcggtgtttgtgttgtgtggtcatcattttgttctttgtttacagaacagagaaagtggattgaacaaggacgcatttccccagtacatccacaacatgctgtccacatctcgttctcggtttatcagaaataccaacgagagcggtgaagaagtcaccaccttttttgattatgattacggtgctccctgtcataaatttgacgtgaagcaaattggggcccaactcctgcctccgctctactcgctggtgttcatctttggttttgtgggcaacatgctggtcgtcctcatcttaataaactgcaaaaagctgaagtgcttgactgacatttacctgctcaacctggccatctctgatctgctttttcttattactctcccattgtgggctcactctgctgcaaatgagtgggtctttgggaatgcaatgtgcaaattattcacagggctgtatcacatcggttattttggcggaatcttcttcatcatcctcctgacaatcgatagatacctggctattgtccatgctgtgtttgctttaaaagccaggacggtcacctttggggtggtgacaagtgtgatcacctggttggtggctgtgtttgcttctgtcccaggaatcatctttactaaatgccagaaagaagattctgtttatgtctgtggcccttattttccacgaggatggaataatttccacacaataatgaggaacattttggggctggtcctgccgctgctcatcatggtcatctgctactcgggaatcctgaaaaccctgcttcggtgtcgaaacgagaagaagaggcatagggcagtgagagtcatcttcaccatcatgattgtttactttctcttctggactccctataacattgtcattctcctgaacaccttccaggaattcttcggcctgagtaactgtgaaagcaccagtcaactggaccaagccacgcaggtgacagagactcttgggatgactcactgctgcatcaatcccatcatctatgccttcgttggggagaagttcagaaggtatctctcggtgttcttccgaaagcacatcaccaagcgcttctgcaaacaatgtccagttttctacagggagacagtggatggagtgacttcaacaaacacgccttccactggggagcaggaagtctcggctggtttataaaacgaggagcagtttgattgttgtttataaagggagataacaatctgtatataacaacaaacttcaagggtttgttgaacaatagaaacctgtaaagcaggtgcccaggaacctcagggctgtgtgtactaatacagactatgtcacccaatgcatatccaacatgtgctcagggaataatccagaaaaactgtgggtagagactttgactctccagaaagctcatctcagctcctgaaaaatgcctcattaccttgtgctaatcctctttttctagtcttcataatttcttcactcaatctctgattctgtcaatgtcttgaaatcaagggccagctggaggtgaagaagagaatgtgacaggcacagatgaatgggagtgagggatagtggggtcagggctgagaggagaaggagggagacatgagcatggctgagcctggacaaagacaaaggtgagcaaagggctcacgcattcagccaggagatgatactggtccttagccccatctgccacgtgtatttaaccttgaagggttcaccaggtcagggagagtttgggaactgcaataacctgggagttttggtggagtccgatgattctcttttgcataagtgcatgacatatttttgctttattacagtttatctatggcacccatgcaccttacatttgaaatctatgaaatatcatgctccattgttcagatgcttcttaggccacatccccctgtctaaaaattcagaaaatttttgtttataaaagatgcattatctatgatatgctaatatatgtatatgcaatatatataggctcttgcttgatctctccaggaggtagtgattatgagaagggggtggagaatgatgagttccttcaccaggagcaaaggacggggatcgtgtggaaccactgcagaactatttccggaatcaactaagtggagagagccaggaaggctgcatcagaacccagtaaagcttcttgtctggatctgagctggtttgttttgtgcttgcttttccctgccttgccactcccctcactcttctcttttccccacagcctttttcacatagctcttggctgtaggattgccccactccaaaaaccagtgtgtggaggtccaggagtgagaccaggaaagaatgtgaaagtgactacacaaggactcctcgatggtcgtggaaaaggaaagtcaattggcagagcccctgaagccagtcttcaggacaaagaaggagcctagagacagaaatgacagatctctgctttggaaatcacacgtctggcttcacagatgtgtgattcacagtgtgaatcttggtgtctacgttaccaggcaggaaggctgagaggagagagactccagctgggttggaaaacagtattttccaaactaccttccagttcctcatttttgaatacaggcatagagttcagactttttttaaatagtaaaaataaaattaaagctgaaaactgcaacttgtaaatgtggtaaagagttagtttgagttactatcatgtcaaacgtgaaaatgctgtattagtcacagagataattctagctttgagcttaagaattttgagcaggtggtatgtttgggagactgctgagtcaacccaatagttgttgattggcaggagttggaagtgtgtgatctgtgggcacattagcctatgtgcatgcagcatctaagtaatgatgtcgtttgaatcacagtatacgctccatcgctgtcatctcagctggatctccattctctcaggcttgctgccaaaagccttttgtgttttgttttgtatcattatgaagtcatgcgtttaatcacattcgagtgtttcagtgcttcgcagatgtccttgatgctcatattgttccctattttgccagtgggaactcctaaatcaaattggcttctaatcaaagcttttaaaccctattggtaaagaatggaaggtggagaagctccctgaagtaagcaaagactttcctcttagtcgagccaagttaagaatgttcttatgttgcccagtgtgtttctgatctgatgcaagcaagaaacactgggcttctagaaccaggcaacttgggaactagactcccaagctggactatggctctactttcaggccacatggctaaagaaggtttcagaaagaagtggggacagagcagaactttcaccttcatatatttgtatgatcctaatgaatgcataaaatgttaagttgatggtgatgaaatgtaaatactgtttttaacaactatgatttggaaaataaatcaatgctataactatgttgataaaagatttaaaaacaactggctgtttttttacactgtggtgtggaagattgtgttgtgttcacaacttttcacttcttcccctgtgtgattacacacacctgcccttgtggtgtgacttgcagtgcgccctacaggccacacaaccccatgccctccaccactggctctgctgctggaatgtgagcagaagtgacatctgcctcatccaagcagagcctcttgctcagccacaggaaggcccattccagatcacacccgtcagcccgtgcgccctggtgaatgagaagacacagggagctgcagccacatataacatgagcaagaagtctgtgtttgctgtgataagccactgagttttaggggttgtttgttaagaagcacaaaaaccgattaagacatgtggtatatagtgacttcatatatagaatctggaaaactatccatttattttcaatcatggaattcaatatgacaagcatcccggagggtctacctatgccagactgggttggaaacagaaagacagatgttaatgccagtgtcctttacacctccaagtccagggccagctgtggagtgggaggggtagagaaggtcctgtgcacagtcacagtgcgctgtgcagagcaggaacagaggcatctgtgaaaagtgctgagagcctggaggacagagtgactaatgcaatgacagtcttgcatcataggaataacagccacagcaggattttattgctgccaaagaaactgccatttaaaaattgccagccatccgggaggctgaggcaggagaatggcatgaatccaggaggcggagcttgcagtgagccgagatcgggccactgcactccagcctgggcaacagagccagactccatctcaaaaaaaaaaaaaaatgccagccatctctctttctaaagtggaatcctcaagtctcgtttattctggggacatttgagtaggctgttcgagttaagcaggtggaagttgatgatccctcatcatcattctgagggatgagtgtctgaagactttttggtaaggaagggtcttggcatagcccaccccatgccacctcccttgatctgtgatatccccagcagctggggaggttggagcattttgcaaagaggccccgaagcctccagaaagtaaaccttcaagagcccatccttccttcctcttttgtttttgctcattatgaaaacttccctgacaaattgaaaaggcttcaggtgagattagcccacaggaaaaaccaccaagggccacccagaggggccacactgtgacagaaggagtatgggctggtgagctgacctctggaagacagtgcatgaattgaggagaagagattggttccaggcatgggaggaatgaggctggaaatttcttcagacattgccacttcggcactctgtgtgtgtgtgtgtgtgtgtgtgtgtgtgtgtgtgtgtgtgtgtgtgtgtgtaaacagagtcctgtaatgcaaggtccggccttggcagccccagcctggagccacagtgagatgtgagctgagggttatgctgggaaaaacctctccctcccagcacctgaaaggctctgcaggcccagcagctcagcaagcaagggtaagggcatggactaacatcttatttcatactatcccttataacacatcctaatgtaatcagctcacaatatgaaattatttcatttctctccagtcattgtttcaatggggccttagggttgactggattctggaggtccctgcctagaggagggggtgcattctgtccctatgtcccctcctgctccatcctccacagcacgtgcctagtggtctaccttgtggggaattcttgtacctccctcttctaggcatggactagcattgagaagtgggagaggagtgttaggaaaaagggcaaatatagacataccttgtcttattgtgctttacagatattgtttttgttgttgttgttgttgtttacaaattgaaggtttgtggcaaccctgcctcgagcaagtctattggtgctgtttttccaacagcatgtgcttgttttacatctctgtgtcacattttggtaattctcccaatatttcaaactttgtcattatttctatatctgttatggtaatctgtgatcagtgatctttgatgtcactattgtagttgttttggggcaccatgaagtgcacccatgtaagatggcaaacaatcaataaatgttgtgtgtgttctgactgctccatggactgcctgttcctgagacacaataatgtatatataacaattatatatatatatatttataacaattatatatatatatattttttttttttttttgaggcagagtcgcactctgattgcccaggctggagtgcaatgatgtgatttcagctcactgcaacctctgcctccccaggctcaggtgattctcccacttcagcctcccaagctgggactacaggtgtgcaccatcacacccggctaattttttttttgtatttttaggagagacagggttttgccatgttgcccaggctggccttaaactcctagactcaaacaatccacctgcctcagcttcccaaagggctgggattacaggcatgagccactgtgcccagcccaagacacaataatattgaaattaagccaattaataaccctacaatggcctctaagtgttcaagtgaagggaaaagtcccacgtctctcactttaaatcaaaatctagaaatgattaagcttagtaaggaggacatattgaaagtcaaggccaaaagctcacctctgcaccagttagccaaattgcgacttcacaggaaaagttcttgaaggatatttaagctctactccagggaacatgcaaatgaagagaaaacaaagcagccatattgctaatatggagaaagtttgagtggtctggagaaaagatccaaccagccacaacatttccttaagtcaaagcctaatccagagcaagactctaactctcttcaatgctatgaaggcggagagaggtgaggaagctgcagaagaaaagtttgaagctagcggaggttggtttgtgaggtttaatgaaagacaacatctccataacataaaaatgcaagatgaagcagcaagtgcaaagggagaagctgtggcaagttatccagaaaatctagataagataattgatgaaagtgtctacacgaaacaacagattttcagtgtagacaaaacagtcttatgttggaagaagatgccatccaggactttcacagctagagaggagatgtcaaggcaagctgcaaagctccacaggacaggctgactctctttttagaggtgaatgcagctgatgactttaagttgaagtaaatgttcatttactattttgtaaatcctggtgtcattaagaattatgcgaaatctactctatctgtgctccataaatggaacaataaagcctggatgacaacacatctgtttacagcatggtttactgaatatttcaagcccactattgagaactattgctcagaaaaaaagattcctttcaaaatattactgctctgcaccatgtcgatcaagagctgtgttggagatgtacgagaatattcatgttgttttcatccctgctaacacaaacatccattctgcagtccatggaccaagactttcaagtcttattaagaaatatatttcataaggctattaagaaatagctatatatatatatatatatagccttatatagtttatatagctaccattgatagtgattccattgatggatctgagcaaagcaaattgaaaagcttctggaaagtagtcattattctagatgccattaggaacatttgtaattcatgggaggaggtcaaaataccaacattaacaggagtgtgaaagacattgattccaacccccatagatgactttcaggggttcacgtcttcagtggaggaagttgctgtagatgtggtggaaacagcaagagaactagaactagaagtggagcctgaagttgtgactgaattgccgcactctcatgatcaaacttgaacagatgaagagttgcttcttacatatgagcagtgaaagtggtctcttgagatggaatctcctcctggtgaagatgctgtgaacacggttaaaatgacaacaatcgatttagaatattacataaatttagttaataaagcagtggcagggtttgagaggattgactccaattttgaaagaagtgggtaaaatgctatcaaatagcatcacatggtatggagaaatcttttgtgaagggaagagtcgaccaaggtggcaaattgcattgtcatcttattttaagaaattgccacagccacccccagctttagcaaccaccaccctgatcagtaagcagccatcaacatcaaaacaagaccgccatcctcttcagcaaaaacactatgacttgctgaaggctcagatgatggttagcatttttagcaatacaatatttttaattaaggtatgcacattggtttttctgacataatactattgcatacttaatagactacagtataggataaacacaacttttatatgcactgggaaaccaaaaaggttatttttgagatatttgctttactgtggtggtctgaagctgaactcacaatctcaccaaggtgtgcctgaacctctttagctaactggccactgccacagtccactctgtgttggtcaagatgccccagagtggcaggcacactgtgtggtcacatccaagggcctagatatggtgggggctccaaatggatctagatatgtgagatctctctttgatttgacttcttccaacccaccattttctgggtgctgggctcatctcacccagaaagtaggacccaatgtgacagttcctgcccagttccctcctgtggtagccacttgacccaggggcactcttgatccttgcagcctcacttacacaccctatctctacccctattaactctctccaatccccactccccctgctcagcttgtctgctgcccagtgggggccccacccatgctggcctctccttttgcaagtccccattcctcatatggtttcttcagagcccctttctttggctttgaggagagatgccctcactcgcttccccaccaatcctgcccacttctacaatccattcattatcctaattgcctccgtatacagactggagtgagaggagttgatgtgatgggtgtggatacagggctggtgctgtcatcttctagtaagccctgggagaggtgtctgagcccaggtgtcagtggttttctttggaactgtgagtgcataacacttctttgccttcagccttaggccatagttgctagttctgggacaaccagaaaagccctacataatctcgtgttatgtgcagagctgagtatagagctccaggtatgatctgactcacttaagatcacagtgagtctattgtattgttgaactgttagcttagacatctgttactgtacctacatggcactagcctcacgcctagacaccgatctgaaagaaatcccctaaatgcatagagaagacttctcagctgagctaaggggctcccaccaggtttgagcctatctaatgaatccatgaggtagacagcctgcacatgtccacttggtttgatgaattgcacaaatccctatgggggatgtggttcatgggctgggaagtgggttaccctgggaaaggtctacaggacagaggcagggatggagacaacagcatggtgagttcccaacccacccacgatgataggtgtctgaggcagaaggtaaagaggctgtcacctggtgggtgtcataagactcaagtgtcattgttgaggcacatgggtaacaaagcgtggcactggatgggggtagattcttcctatttctgtgaggatcagggggactccctggctctcctgctaaaggtggctctagggacaggaagagtgtacttcttgacagggatgtcagagcactgatggtgacaatcagtgtgacactgctcacatgactgaacaaccgagaagagcccgactgtctactgaacaacgggaagagcccgactgtcaatgacggagctctgttaaatatagttaaggctattttgttgaatgaatgaagccagacaggaaagaggacagtatctttaatccatttatagaagttaaagacaggcttatttaatctctatgaagacagagtggcccttacctctgggtggagcaaaaggcaccttctgaagtgatagggatgttccttatcatcttgatccggagtggtagttacatgcatgtatgcatatcaaaactcaccaagctgtaccactaagtgtgttcttcctcaataaaaataataaagaactacacttataaagaattttttaataatataggaaaatgtctacactataatctttagctaaaaaaaaaaaaaaagaagccgcctacagaatggtatatgcatgagaacaattaatcgaaaagtgcatgggaaaagtcaggattgaaacatcatgttttaaaagacattgttttgatactgtgagaatgtacctaagtttttccttttttctgtttttcccaattttatacaatgagcatgtgttggttttataattagacattttgtttgtttggtttggttttgagacacagcttgctgtcacccaggttggagtgcaatggcccaatcttggttcactgcaacctccatctcctgggttcaagagattctcccacttcagcctcctgagtagctgggactataggggcgcaccaccacatccagctaattttgtgtatttttagtagagatggggtttcaccatgctggccaggttggtctcaaactcctgacctcaagttatccactcgccttggcttcccaaagtgctgggattataggcatgagccaccgcacttggcctagacatttgtttttaaaaataaaagattcatttgctctttttacagcccgtctcactgttgactgatattgaccaggagtcaactcaggccccagggattttcacaacagctgctgtatggcagggtttctgctcactgtgctcatgtagttggcccttgcacccaaagtgaataattaacattctccccatcctgttgacgatgctctgaaaatatggtccagaaatggtgtgagcaaggagacagcaaagcaatgcttggaacataggtgcagtgactagacatggggcagctgtttaaagacaaaaaggccccaaaaaggagggatggcacgaaacaccctccaatatgggcatggagtctagagtgacaaagtgatcaaaagttcatttcctatggggtgtccgaatgtacttaataataaaaagagaacaagagccatgcaaactgagagggacaaagtagaaagagtagcagacaccaagcaactaagtcacagcatgataagctgctagcttgttgtcattattgtatccagaacaacatttcatttaaatgctgaagaatttcccatgggtccccactttcttgtgaatccttgggctgaacccccctgtcctgagtggttactagaacacacctctggaccagaaacacaaaagtggagtaacacacactgcaaagctgtgcttccttgtttcagcctgtgaatcctcaccttgtttcccatctagcctatatttttcaaactaacttggccatagaatcatgtagtatttagggtggaagctgccccaggtctagcacgtcatttaacagatgaggaaatggaagcttgggcagtggaagtatcttgccgaggtcacacagcaagtcagcagcacagcgtgtgtgactccgagcctgctccgctagcccacattgccctctgggggtgagtatgtcttcacatcctccaataccctaatgacagacaaacagaacatggcaaagcctcagctctgcatggtgaaagtaagaaccagcaattgccacaaacagaaatacagtgttggtccggcagcctccgggggttctgcacaagtggattaccagtgaatacaaggctatctatctttcgaaaaaccaacgttgtatttatgctattttctataaaattttatattaatttatttgttacctatttttgaactctttcaaaagcacactttatatttccctgcttaaacagtcccccgagggtgggtgcccaaaaggctctacacttgttatcattccctctccaccacaggcatattgagtaagtttgtatttgggtttttttaaaacctccactctacagttaagaaaactaaggcacagagcttcaataatttggtcagagccaagtagcagtaatgaagctggaggttaaacccagcagcatgactgcagttcttaatcaatgccttttgaattgcacatatgggatgaactagaacattttctcgatgattcgctgtccttgttatgattatgttactgagctctgttgtagcacagacatatgtccctatatggggcggggttgggggtgtcttgatcgctgggctatttctatactgttctggcttttcccaagcagtcatttctttctattctccaagcaccagcaattagctttaccttttcagcttctagtttgctgaaactaatctgctatagacagagactccggtgaaccaattttattaggatttgatcaaataaactctctctgacaaaggactgctgaaagagtaactaagagtttgatgtttactgagtgcatagtatgtgctagatgctggccgtggatgcctcatagaatcctcccaacaactcatgaaatgactactgtcattcagcccaatacccagacgagaaagctgagggtaagacaggtttcaagcttggcagtctgactacagaggccactggcttagcccctgggttagtctgcctctgtaggattgggggcacgtaattttgctgtttggggtctcatttgccttcttagagatcacaagccaaagctttttattctagagccaaggtcacggaagcccagagggcatcttgtggctcgggagtagctctctgctgtcttctcagctctgctgacaatacttgagattttcagatgtcaccaaccaccaagagagcttgatatgactgtatatagtatagtcataaagaacctgaacttgaccatatacttatgtcatgtggaaaatttctcatagcttcagatagattatatctggagtgaagaatcctgccacctatgtatctggcatagtgtgagtcctcataaatgcttactggtttgaagggcaacaaaatagtgaacagagtgaaaatccccactaagatcctgggtccagaaaaagatgggaaacctgtttagctcacccgtgagcccatagttaaaactctttagacaacaggttttttccgtttacagagaacaataatattgggtggtgagcatctgtgtgggggttggggtgggataggggatacggggagagtggagaaaaagggggcacagggttaatgtgaagtccaggatccccctctacatttaaagttggtttaagttggctttaattaatagcaactcttaagataatcagaattttcttaaccttttagccttactgttgaaaagccctgtgatcttgtacaaatcatttgcttcttggatagtaatttcttttactaaaatgtgggcttttgactagatgaatgtaaatgttcttctagctctgatatcctttattctttatattttctaacagattctgtgtagtgggatgagcagagaacaaaaacaaaataatccagtgagaaaagcccgtaaataaactttcagaccagagatctattctctagcttattttaagctcaacttaaaaggaagaactgttctctgattcttttcgccttcaatacacttaatgatttaactccaccctccttcaaaagaaacagcatttcctacttttatactgtctatatgattgatttgcacagctcatctggccagaagagctgagacatccgttcccctacaagaaactctccccggtaagtaacctctcagctgcttggcctgttagttagcttctgagatgagtaaaagactttacaggaaacccatagaagacatttggcaaacaccaagtgctcatacaattatcttaaaatataatctttaagataaggaaagggtcacagtttggaatgagtttcagacggttataacatcaaagatacaaaacatgattgtgagtgaaagactttaaagggagcaatagtattttaataactaacaatccttacctctcaaaagaaagatttgcagagagatgagtcttagctgaaatcttgaaatcttatcttctgctaaggagaactaaaccctctccagtgagatgccttctgaatatgtgcccacaagaagttgtgtctaagtctggttctcttttttctttttcctccagacaagagggaagcctaaaaatggtcaaaattaatattaaattacaaacgccaaataaaattttcctctaatatatcagtttcatggcacagttagtatataattctttatggttcaaaattaaaaatgagcttttctaggggcttctctcagctgcctagtctaaggtgcagggagtttgagactcacagggtttaataagagaaaattctcagctagagcagctgaacttaaatagactaggcaagacagctggttataagactaaactacccagaatgcatgacattcatctgtggtggcagacgaaacattttttattatattatttcttgggtatgtatgacaactcttaattgtggcaactcaaactacaaacacaaacttcacagaaaatgtgaggattttacaattggctgttgtcatctatgaccttccctgggacttgggcacccggccatttcactctgactacatcatgtcaccaaacatctgatggtcttgccttttaattctctttttgaggactgagagggagggtagcatggtagttaagagtgcaggcttcccgcattcaaaatcggttgcttactagctgtgtggctttgagcaagttactcaccctctctgtgcttcaaggtccttgtctgcaaaatgtgaaaaatatttcctgcctcataaggttgccctaaggattaaatgaatgaatgggtatgatgcttagaacagtgattggcatccagtatgtgccctcgaggcctcttaattattactggcttgctcatagtgcatgttctttgtgggctaactctagcgtcaataaaaatgttaagactgagttgcagctgggcatggtggctcatgcctgtaatcccagcattctaggaggctgaggcaggaggatcgcttgagcccaggagttcgagaccagcctgggcaacatagtgtgatcttgtatctataaaaataaacaaaattagcttggtgtggtggcgcctgtagtccccagccacttggaggggtgaggtgagaggattgcttgagcccgggatgatccaggctgcagtgagccatgatcgtgccactgcactccagcctgggcgacagagtgagaccctgtctcacaacaacaacagcaacaaaaaggctgagctgcaccatgcttgacccagtttcttaaaattgttgtcaaagcttcattcactccatggtgctatagagcacaagattttatttggtgagatggtgctttcatgaattcccccaacagagccaagctctccatctagtggacagggaagctagcagcaaaccttcccttcactacaaaacttcattgcttggccaaaaagagagttaattcaatgtagacatctatgtaggcaattaaaaacctattgatgtataaaacagtttgcattcatggagggcaactaaatacattctaggactttataaaagatcactttttatttatgcacagggtggaacaagatggattatcaagtgtcaagtccaatctatgacatcaattattatacatcggagccctgccaaaaaatcaatgtgaagcaaatcgcagcccgcctcctgcctccgctctactcactggtgttcatctttggttttgtgggcaacatgctggtcatcctcatcctgataaactgcaaaaggctgaagagcatgactgacatctacctgctcaacctggccatctctgacctgtttttccttcttactgtccccttctgggctcactatgctgccgcccagtgggactttggaaatacaatgtgtcaactcttgacagggctctattttataggcttcttctctggaatcttcttcatcatcctcctgacaatcgataggtacctggctgtcgtccatgctgtgtttgctttaaaagccaggacggtcacctttggggtggtgacaagtgtgatcacttgggtggtggctgtgtttgcgtctctcccaggaatcatctttaccagatctcaaaaagaaggtcttcattacacctgcagctctcattttccatacagtcagtatcaattctggaagaatttccagacattaaagatagtcatcttggggctggtcctgccgctgcttgtcatggtcatctgctactcgggaatcctaaaaactctgcttcggtgtcgaaatgagaagaagaggcacagggctgtgaggcttatcttcaccatcatgattgtttattttctcttctgggctccctacaacattgtccttctcctgaacaccttccaggaattctttggcctgaataattgcagtagctctaacaggttggaccaagctatgcaggtgacagagactcttgggatgacgcactgctgcatcaaccccatcatctatgcctttgtcggggagaagttcagaaactacctcttagtcttcttccaaaagcacattgccaaacgcttctgcaaatgctgttctattttccagcaagaggctcccgagcgagcaagctcagtttacacccgatccactggggagcaggaaatatctgtgggcttgtgacacggactcaagtgggctggtgacccagtcagagttgtgcacatggcttagttttcatacacagcctgggctgggggtggggtgggagaggtcttttttaaaaggaagttactgttatagagggtctaagattcatccatttatttggcatctgtttaaagtagattagatcttttaagcccatcaattatagaaagccaaatcaaaatatgttgatgaaaaatagcaacctttttatctccccttcacatgcatcaagttattgacaaactctcccttcactccgaaagttccttatgtatatttaaaagaaagcctcagagaattgctgattcttgagtttagtgatctgaacagaaataccaaaattatttcagaaatgtacaactttttacctagtacaaggcaacatataggttgtaaatgtgtttaaaacaggtctttgtcttgctatggggagaaaagacatgaatatgattagtaaagaaatgacacttttcatgtgtgatttcccctccaaggtatggttaataagtttcactgacttagaaccaggcgagagacttgtggcctgggagagctggggaagcttcttaaatgagaaggaatttgagttggatcatctattgctggcaaagacagaagcctcactgcaagcactgcatgggcaagcttggctgtagaaggagacagagctggttgggaagacatggggaggaaggacaaggctagatcatgaagaaccttgacggcattgctccgtctaagtcatgagctgagcagggagatcctggttggtgttgcagaaggtttactctgtggccaaaggagggtcaggaaggatgagcatttagggcaaggagaccaccaacagccctcaggtcagggtgaggatggcctctgctaagctcaaggcgtgaggatgggaaggagggaggtattcgtaaggatgggaaggagggaggtattcgtgcagcatatgaggatgcagagtcagcagaactggggtggatttggtttggaagtgagggtcagagaggagtcagagagaatccctagtcttcaagcagattggagaaacccttgaaaagacatcaagcacagaaggaggaggaggaggtttaggtcaagaagaagatggattggtgtaaaaggatgggtctggtttgcagagcttgaacacagtctcacccagactccaggctgtctttcactgaatgcttctgacttcatagatttccttcccatcccagctgaaatactgaggggtctccaggaggagactagatttatgaatacacgaggtatgaggtctaggaacatacttcagctcacacatgagatctaggtgaggattgattacctagtagtcatttcatgggttgttgggaggattctatgaggcaaccacaggcagcatttagcacatactacacattcaataagcatcaaactcttagttactcattcagggatagcactgagcaaagcattgagcaaaggggtcccatagaggtgagggaagcctgaaaaactaagatgctgcctgcccagtgcacacaagtgtaggtatcattttctgcatttaaccgtcaataggcaaaggggggaagggacatattcatttggaaataagctgccttgagccttaaaacccacaaaagtacaatttaccagcctccgtatttcagactgaatgggggtggggggggcgccttaggtacttattccagatgccttctccagacaaaccagaagcaacagaaaaaatcgtctctccctccctttgaaatgaatataccccttagtgtttgggtatattcatttcaaagggagagagagaggtttttttctgttctttctcatatgattgtgcacatacttgagactgttttgaatttgggggatggctaaaaccatcatagtacaggtaaggtgagggaatagtaagtggtgagaactactcagggaatgaaggtgtcagaataataagaggtgctactgactttctcagcctctgaatatgaacggtgagcattgtggctgtcagcaggaagcaacgaagggaaatgtctttccttttgctcttaagttgtggagagtgcaacagtagcataggaccctaccctctgggccaagtcaaagacattctgacatcttagtatttgcatattcttatgtatgtgaaagttacaaattgcttgaaagaaaatatgcatctaataaaaaacaccttctaaaataattcattatattcttgctctttcagtcaagtgtacatttagagaatagcacataaaactgccagagcattttataagcagctgttttcttccttagtgtgtgtgcatgtgtgtgtgatgtatacaaagagagagataattgtatttttgtattttcttttaaataatttttaaaattgacccttttcctgagacaaattgccagaatagtttgtatttagagatggtacctctaagagtaaggttgctggttgctgagcaattgacttgaaaacttttaaaattcaaattttaattccactactcaaaagaattgccatgttttaaaaaagagaattggtgccataagttagttgtctatgtttgaaaatgaagaagatatgcaacgtcatggcctggtcacttacccgcagccctgagttgtaggcacatcatatgtgagaatgaggatgcttttctttcatttaaaatccctccccaaaacttggctctaattgcagtcatgacaatcatgtacatttggatttatgtgcacgagtctcttaccctgagagaggacaggtgctacaggtggaggggacccgtctgggtcacgttcacattttgaacatgctggttttcagtcactgcacactcatctcccagcgcaggtcatgggcagcagatgcaaaagctgcccgtggtcctatttggaggtgcatgaaatgagcagaagacagaatagcttgatctgactagaagggcagcttgtccctaccaagacttgaaggattgcctttcatctgttagggtaaaaggtagaatgaaccaaggaagggcaggagggggctggggttagggtagaaggaaggggccatggagaagggagatccatcccataggaggaaggcagtgcggcagggaggtttgaaggtatcagcttttgtggctgacatacatgcagtcatgtcaattgctcgtttttccttttccatcttattaaatgtcttccaatgttagcacgaagaaaagctatttgcagtgttgccagcctttccagagcccgtccccattacctccccaggcccatgcctttactccttggagtttcaactcacgaccttcaggatctgactttattcaccaactctggggtgaacgtaccttctgtctccacccagaggtctctatcaaagaggagattgcatgccatggataaagtcaaagtagaggtgactgtccttaggaagagtaatgtgaaaattcataaactgggattctgtttacattttgtactccaggggttcttagtttaaatcgctctgaataaattaagatgcaatggcatttcaactgttatgattaaatttacaaatcatttattttctatcacggggagagatagagctccaaatgcaaacataactgctcaagtgttaacacttataatgaaaacataagaattaccaccaactaccctgggggctagaagcagaaatgtgaaccagaaaacaaatcatgaactttcctttttttttttgagatggagtctcgctctgttgcccaggctggagtgcaatggtgcgatctcggctcactgcaaccactgcctcccgggttcaagcaattctcctgcctcagcctcctgagtagctgggactacaggcatgcaccaccacgcctgggtaattttttgtatttttagtagagacagggtttcaccgtattagccaggatgctctcgatctcctgacctcgtgatctgcccgcctcggcctcccaccgaagtgctgggattacaggcatgagccactgtgcccggccaacaaatcatgaactttctaactgcagttccttgtagcttgttaacacatccacttacttattgtcagagtacgtggagattttccacaaccctcggggataaggctgaacagaagaggcaaaaacgtgaaaacatttcgatagctcctatactttgaaataaaattcactgtaaaagttgcttgtatttttccaaaacagagtcaacccttaatatttaagattctgtatacaaatacatatttttatataattaatatatattgtcatatgacatatatctttatattaatatgcatgcatataatatatatttccttcctaattttctataagcaattttacaagactgacttctatttgcctccttattgttactacgtggtttgataatccgttttgtgtcattgtgattctgtcatgttttggggacttatttttgtttctctgggtggtcactagtttttttaaagcattcatggaagagtgtgaatcttttacaagctaggaagccatggcaagccttgggtcatactgcccccgcgaggccacattggcaaaccagcaagggtgttcaacttccagacttggccatggagaagacatacgaggaggcttttcacattcagctctttaatgtttgtctctgccggcaccatcccagttgtgaataagaggtatttccacagcggctcagggtaggtagtgcacagctcacattcatcatttctgaaaaccgagaggagtctccattcggggtacaggttgatgcctgtcgtggaatgaaggttccaacacccagaccaatctctgcagtgtgctgctctcatgagcttgcaacaagatcagaaaatgttttgtgactaagcatttttcatattgcataaaatgcttcaagctcctcccttgtttctctctataatcctgtatatctgatgattgtgggtaccaagtgtttgaaataatcaaatgtgatttgatgttggtaaatttctttttttttttttttttacttctattttttttattatactttaagttttagggtacatgtgcacattgtgcaggttagttacatatgtatacatgtgccatgctggtgcactgcacccactaactcgtcatctagcattaggtatatctcccaatgctatccctcccccctccccccaccccaccacagtccccaaagtgtgatattccccttcctatgtccatgtgatctcattgttcaattcccacctatgagtgagaatatgcggtgtttggttttttgttcttgcgatagtttactgagaatgatggtttccaatttcatccatgtccctacaaaggacatgaacatagcaaagacttggaaccaacccaaatgtccaacaatgatagactggattaagaaaatgtggcacatatacaccatggtaaatttctttatcattcgcactctcctttctctattattgttattgtaactgaaccgcagattagtcactcattgcttgcagaatccaattaacaagagcgaggtcagatataaagaaaatgatttattccaaacctccttcagggaagaggtgcagcctcctgcctctaaatgcactgcttcgccaggcgtggtggctcacacctgtaatcccagcactttgggagaccgaggagggcagatcacttaaggtcaggagttcaagaccggcctggccaatatagtgaaacccctgcctctactaaaaatacaaaaaattagccagacgtggtggcgggtgcttgtaatcccagctactcgggaggctgaggcaggagaatcgcttgaacctgggaggtggaagttgcagtgagctgacatctagccactgcactccagcctgggtgacagagtgagactctgtctcaaaataaataaataaataaataaataaataaatagtaaatgcactgctttgcttttggagcagaaagcaggcactttgaaaaggcaggggaggaagtgagcaagggcagggggtctgcacactggcatggtgcctgatctatccaggcagttgaattggcactttcataggcagaaataagttgaaaaagtggcctaaaactctctaggtgggagtggatagtgggcatgccttcaacctgcctttctggagggtgagttccatggcaaccccctgaagggtgagagttccatggagatcatgctttggtctgtaaatcagctgttaactctctagaaagttctgtcttggagcatatagttagatgaacttgccctgtaaagaatgtctggtgaaggggaagtaaaaggtgagatttgcatttctaaagggctaagtagaacgtggggtacaagaggaaaggagaaaagagaaaataatttaaaaaataattgtaacttattcccttttacttagaaaaaagggaatactcagttacattatcacctcgtttacatcaaaccctcttatggaatcctatggtttgaaaacaaaaaggttgttgaggaccagtgagcccaacccctttgctttataaatgaagagcattgcctgccctaagccccagagactctgatgtcgtgggtctggagtgggctccaacagcggcatgttttgatggtgcttcccagtggcacgccagcgatgagcctttgagtagggaaagtaggagcactcgtgactcccttcacgatcagcacctgtgtgctaataaattcacaaaagccaacatattggagtcactcagggagttttacaaatagtgaggttaaatccaacctcaaatagttctgattcgatctgcctgcattgctgccctgtggttccccactgtagaagctccccaggtgattctaagtgtagccaagtctgagaaatactgcctaaagcctgttggactgacagcaagggctgttgtctgagcaagactttgcctggcctggggtggcatgtgcaccaggaagagtctcaactttcataacagaacattccccaagctggtttttttaaagcatgtgaatctagacttcattggcaataccaaagatctgtatttgaggctccaagtatttcactttcatttttggttttgggttatgttttcacccttcctttccaagtgaaaagtaaacagaagtgggatgtctggcgcccatgctgagcttggcaacttcaaattcaatagagaagaagtctcttgtatagaaaagggcctgtctgagatgtttctcaaataaatatagattttgcttatgtggctaaaggattcttctccccccatttccttatccctgcagtgagccatccttcttaactctttccatgaaagcattattcctgaagaactgggaactcatgccagccctgatcaggcaatgataattctgcagagaattagaatttagatttaaattgtcaactcttatacatcctggcatatggtttaaacacatgtacacacacacaaacacctcctactatttactgaagagcagatatctgataacttaatctttttggttttgagtcaagacaattcctccttttgaaactgcataccgctgaatataataaaatgtaattaagattaaaaataagaaactaatgggagaatttcaatattgtctctgttcactttaaaattcctctacttaggtttactgccattaccaaagactattcaaaaatcctttttaggagaatcctaatggtttcctgacatataatcaaataaggactctgttgattggctaactcaatcttcctgtgccaaaaagcagagcccagcagagaagagggcagggacttgaaagtcagactgactcgagttccagccttggggctgtgggagcttgggcaagtgacttaacgtctctggctctcaggatctaaaaggatttccagtagtaatttggggtgttactgatacaggagctaaaaagaaattatttaggtggttagtgagggtcagagagtcctcggtaagatttgccttttaacaaaaagcagccccaaaatcatttgtttgctaacaaagagaagcctgtaaaattgagctgcagacatagataagcaagctggaagcttgcacgggtgaatgccggcagctgtgccaataggaaaaggctatctgggggccaggcatgttcaacatggattctccatcttcccttttctttgtcaaccaagtgtacagtaaaggaacaggcaacatggcacgggccaggtagagaacccttctgcataataaaagattagggtgagatggccagcttcttcccgtgctatgtaaatggcatacctggtccaaccagtcttttgggccctgtgtaaatcagacaccgcctcctcaagttagtctataaaaccccatgcattttaccgtgaaactgggagatccactcggaaccccctcctgcacgagagaccttttctcttttgcctattacacttccgctcttaaactcactgctcatgtgttagcatccttgatttccttggcatgaggcaatgaaccttgtgtattaccccatacaaatgatgctgcttcattactaatagcaacctgacagggttgtgttggggtataaattatctagaccagggagatccaatataatttttttgtaatgacgggaatgctttgtatctgcatcatccaaaatggtagccaccaggccagggtgaaatgtggccagtgtgactgaggaactgaatgttttccatgatttaatttaaatgtggccaatggctactgtaggagacagtgtgagtctggcatattataaataataaatattaatataatttgaactttggcatcagtgtttcctagatttgaattactatgcaagttgcttactgtttccaagcctcagctttctaatctgtaattggggctaataatagtatctgccttacaggtttgttcagaggataaatgagaaattgcatgttgagggcttaacacagtgcctggcacataaaagctctggtaacagttagccactttaataatttgctaataatggctatttcttcttcagattaggatgtgctcccccaaacagtgcacttagacatagcgggcaatccagctcactctctgcagtgagagagaagcactggccgaccagagtcagccaggggctcatgggtatgaaatcaacagcatgattttgtaagtaatggatggaaagggcctcacaactttatggcactgtgttcaatttgcttggtcttctgtagctccttttgaaagccttttagggtggattaacctgctaccaataattctggtcagatgtagactccatagctcaaagcaaactgagagagtgagggcagcaggccaattccccaccccttccttctggactctgacagaagcttacactcaaggaagagcaagtaggaattaacgtgttaagagctaggtaagcaaaacccaatgagaagttctggcaaagccccatgggcaggggtggcttaggcacaggaaacaagtaggatttcataccacgcgcctcagtctacttccggggccctcatcctcagctgtgcctatgcaaaggagagcaaccaataaaccccaccgccactctcctactgtggaggccagggatggccaggggtaagagagggatgggaagtgtttcctccagccgtcctctgagaaggagaggaaactgggcagagcttctgtcctccttcaagcagaaacagaaacaaaagaaacccctaagggggttcttacttcccctctagttcagttgtgcactaaccatctgcagctcaacattcagcattcattcattgattcagcaaacattgaaggagggccagctatgtgccagatgccaactcatgccatgaaagagagtccctgtccttatgaaattcactatttagagagaaaagcaagcaaaaaggcaaagtttgaaaagtactgttgaagtggcatcattgtctggggtgaatacctgaggtttgtggtctcacgccaagggaatcaaggactcaggcacacaagaagtgagtttaagagcagaggtttaataggcaaaagaaagagaaaaaagaatagctctcttgcctgcacagagagaggggcacctgagtggatcttcctgttttgtggtgaaatgcaaggcattttatagacgagcttgaggaagtggtgtctgatttacttaggacccgagagattggtcagaccaggtgtgatgtttacatagcatacaaagaagctggccatcccatcctaatcttttattacgcagacggggtctatacctggctggtgccatgttgtctgttccttactgtacacgtggttgacaaagaaaagggaagatgaagaatccatgttgaacatgcctggcccccagatagtcttttcctattggcacagctgccggcattcactcttgcaagcttccagattgcttatctatgtctgcagcccaattttacaggttgctctttgctagaaaagaaatgatttgggggctgcttttcattaaaaggaaaaccttaccaaggttaaaaagaaaaaaatttctttttaatgcctatgttactgtgaacagtgtcgggataaggctctgagagccagatgaggatgagttatccaatccaaggatgggggtctggaggaaaaaatcctagagagcattgctgcagttgaataaggattagttagaagctactgagtggagcataggagtaggaactcttatgcaaatgtgcagaggtgaaataaagcaaggtatagtccaggtgcctaaagtagcacagctgacttgagatagatgatagataggtagatagatggatagggtacatagatgatagatagatagatagatagatagatagatagatagatagatagacagacagacagacactggtgtgagtgtgggtgtgtgtgtctggctgcgtgcatgcattcctcctgcaggagatcaggagcagtgggcagtatggagtgacaagaagattgggaggtactccttctagccctcccctctgctctgccctccactggagcagaagcaaagcatatggtgaaggggaacaaggagtctccccagcacagtacccgagtgcattagctatttatcactccacagtccccattcacgtgttaattcagcatttattgaatgcttactgtttgcaatgtctatgtcaagctgtcaagtgtagtttttattctacaggccacaggcaccccctaactgtgttaaacaagatggtagtattgagacaggaataataagggtggtcacaggagaatggaagattccaggcagcagtttgactagtaaaaaaggaaactgttgaaatagctgcataatccaggggtcaataagaacctgagaaccagggtgtgagccaaggctggttaaaagcaactggatccaatatggtgctgagtttctcctaggttttgcctggaacctcattatatgctcaataacataccaaatcacacacccaccagggccattccatttcctggaacactcatgtttggtgtaaaaatgggtggcaccacagctctgagaaatctttacctttttcaggaaacttcatgaatattccatcctttggttaaagaaacccataatgtagaagccccaaaccctactgggcgcaactctctctctcttgagtatgcctgcacttccctttattatttatttatttatttattatttatttatttattttttagatggagtctggctctgtcacccaggctggagtgcagtggcgcagtctcagctcactgcaagctctgcctccagggttcaggccattctcctgcctcagcctcctgagcagcagggactacaggcgcccaccacaacgcctagctaattttttgtattttcagtagagatggggtttcaccatattttattttatttttgagacagggtctcactttgttggctcgctgcaacctctgcctcccaggctcaagcaatcctccaacctcagccccccaagtagctgggaggacagacgtgcaccaccacacctggctaatattttgtatttttttttgtagagacagggtcttgccatgttccccaggctggtcttgaactcctggactcaggtgatcagcctgcctccaccttccaaagtgctaggattacaggaatgagccaccccacccgaccacactcccatttcttgagtgtgtgcattttgctctgcaataaatctctctactttcacttttctctgactcgtccttgaattccttcttgtgacagcgtcaacagcctggacaccaggtgcagtcaacgtctcaccagtgtttagggacctcccctaatccactggtatcagcatgatcagacttgctttttcagaaaaagccttctgtccatagaccaaagggaagtgactcagagaaggggcaggaggaatcacaagctccctgcctgaccaggcctggactatggcagagacagtgagatggtgagaaagcaagggtagacagccagccaaatccagaatatagaaagttctacaggaaaaggtggggccaaggtgggacagggggaaaggaattgttgcacattaacagtgcaatgcagagcactggtcttgtttatgtccaggttagaacaaaccaatgagaaagcacatctttgagacaactggagaaatttgaacactgactagatataatattatgttaattatgctttaatttggggtacaataatgcttttgtagctatttctaaagagtccttatctcttaaggatacactctaaaatactagtggattaagttatatgatgtttagactctttttaaaataatccagtggggtgagaggcagagggaagggagaggagcatagaggaaacagtgttggccatatgtttgtaattgttaaaactgagtgatgggaatatggagatttaacatattaatactattttctgcccatgtaatatttgaatattttcataataaaattgagagagagataaagaaagaaaagagaaaagaagagaagagagaagagataagggaagtggaggaaaaagagctttcttcaaggaccattgtggtggacacaaatgaaagatacccccttcctactatgaattctaggtgtgtactacccaagatgagtcaatcggatcctagcttccagaaatcgtgagcatgatgcagccctacagacgcagtgccctggaaaggagacccatgaccatccaaggaagatgtcccatcacagaactgccctgggtcatgtgttttccaagtccacatgtccggtagttccttctttcctatgaccaatgccaccagtcttccagcactgtcctttattgctaggcaaacctgagccatcctcttcttcttgcaacttgtgcctgaagtaacatggacacaaagtccccacttttcccacattctcagaatgaagtagttctccctccacactttaggtgctagaggcaagtggattgcttgagctcaagagttcaagaccagcctgagcaacatggcaaaaccccgtctctacaaaaaatacaaaaattaactgggggtggtggtgtgcacctgcagtcccagctactcaggaggcagagaaggaggatttcttgagccctgaaggtggttgtgttacgtgcattcatgttaagagaccaccaaacaggctttgtgtgagcaattaagctttttaatcatgtgggtgcaggcagactgagtctgaaaaaagagtcagcaaagggagatagggatggggcggttttataggatttgtgtaggtagtggaaaattacagttaaagggggttgtcctcttgcgggtacaggcgggggtcacaaggtgctcagtggggagctcctgagatttattgtccaggagaaggaatgtcacaaggtcaactgatcagttagggtggggcaggaacaaattacaatggtggaatgtcatcagttaaggcaggaactgggtattttcacttctttgtggttcttcagttgcttcaggccatctggatgtataagcgcaggtcacaggggatatgatggcttagctcgggctcagaggcctgacattcctgtcttcttatattaataagaaaaacaaaacaaaatagtgatgaaatgttggggcagcgaaaatttttgggggtggtatggagagataatgggtgatgtttctcagggctgcttcaagcaggattaggggtgacacaggaacctagagagtgagagagattaaactgaagaaagattttgtggtaaggggtgatattgtggggttgttagaaagagcaattctcatatagaatgattggtaatggcctggatgcagttttgtatgaattgagaaactaaacggaagacacaaggtctgaataagagaaggagaaaaacaggcattaaaggactaagaactgggaggacccaggacatccaattagagagtgcccaagggggttcagcataattatttgcttggttggtgagtttttggtctccatccttgagttttttttatgttgtcatatgccaggccagattgatttaggtaaaaacaacactcttcatttaaaaatatacagagttctcctttctcagcagtgagtaagtcaaggcctcagcagttttggaggaaagagaaatgcaaaggaagcaattgtttgttaagaaggattagaaatggctaggagagagtgagtgagattgatagtgtggtggagatagctgaggagaggtagagggtggcataagaatgggaacgagaataagagtgagtataaaagtaaagaatagaacttcatcagggtgaaagtattggagggtgccctgtcagcaaagatcatctgtccactccaagagggagtcaagagtggcggattggggatagtaccaggagatatccactatgatggtttggaggaaaagtgtaaactggcagtgtaaacaggggcagggcatttatgagtcattgagaatggtgaataggagtatgactagacagaagatagtggagatgacaaattttgggggcacagtccaaatagtgggggtgactgcgtagagctctgttgcaaaaagtagggtaaggataaatagacttaatagaatgaagagatgtattaggctcataagggttattattgttcttcagaaatgcgagtgagtttaagggaagtaggggtgagtacttgcgacttccagaaggaagaggagagatcaggctggctgtctgatgggcacagctttattctggaacagtgaatccaatggggagggtcgtgcagacggatggcagttggggtgctataaatgaccaggtagggtccagtccatcaaagctgtagagtgtgaggggtcagacttgacaaggactgattgcccagctaaggtatcttcacatggctgggagtttggaggaggcaagagaagattagcagcctggcgaatttcctgtctagcctgctggaggactggaagataaaggcaacaggtcgtgggcctggatcctgtgtgaggactctagcagcacagccttgtatttcagctgtgtgtaaggaaaaaggatgggacgagtcggggagtgctagtgtgggagctgtctccaggtcctttttgagagagtgaaaggaagaatggggaaaagacttatggtctatgggattagttaaattaccctttgtgagctagtaaagtggtttgattaggatagcaaagcccggtatccaaagttggaaatatccaacaatgcctaagaaggaagggagttgttgtttggtggtgggggttggggtctgggagattaactgaacagagtctgcaggaagggtatgtgtatgttgatggagcattataccaagataggtaatgctaggggaagaaatttgtgcctcagagggcaatactttgtacccctttgagtaaagatgttgaagaagcaggctagtgtcctgctgggaagattggtaagaggggctgcaaagaagaagatcatcaacatattgaataaggtgggaggtagatgggtgaaaagaaagcagatcatgagaaagggcctggccaaagtaatgtgggctgtccctgaagccttggggtagaaaaatccaggtgagttgttgggactggtgggtgtcagagtcagtccaagtaaggcaaaaagaggctgggaggagggatgcaaggggatagtaaagaaggcatctttgaggtcgataacagaatagagttgtggaagggtgtattgaagataggagggtgtacgggtttggcactataggatggatgggaaggacgatttgatcaacaagacgaagatcctgaacaaacctgtaagacttgtccggtttctggacgggtaggataggggagttgtaaggagaatttgtaggctttaagaggccatgttgaaacaggcaggtgataacaggctttaacccttttaaagcctgctgtgggatgggatattggcattgagcggggtaagggtgattacattttaatgggatgataaggggtgcatgatcggttgccaaggtaggagtagaggtttcttatacttgtggattaaggtggggagatacaaggggaggatgtgaaacaggtcttgagttgggtaaaagtgcagcaaagagatgtggctgcagcccaggaatactcagggaagcagataatttggttaaaatgtctcagcctattaaggaagctggacaggtggggataactaaaaaagtgcataaaagaatgttgtccaagttggcaccagagtgggggagttttaagcggtttagaagcctcgccgacaatacccacaacagttatggaggcaagggaaacaggcccttgaaaagaaagtaatgtggagtgggtagcctccgtattgattaagaaggggacagacttaccctccactgtaagagttacccaaagcatctgtgatggtccaggaggcttctgaggtgatcaggcagtgtcagtcttcagctgctaagctgagaagatctgggaaggagtcagtcagagagccttgggccagagttccaggggctctgggagtggttgccaggcaagttgaacagtctgatttccagtggggtctcgcacagatgggacattccttggcccagtggccagatttccggcacttgaaggaagatcctgggggaggaggtcctggagaaatgcctggcccctgcagtttaggtgttttgaagttcttgtgtgctggagatgtggctggggtttctcttacagcggaggcaagtaattgcaactcagaaatatgttgtcacttggctgcctcttttctattattgtacaccttaaggcgagggtaattaaatcctgttgtggggtttgagggctggaatctaatttttggagctttttctaatgtcaggagcagattgggtaataaaatgcatattgagaataagacggccttctggcacctctgggtctagagaggtaaagtgtctaagggttgttgccaaacaggccatggactcagctgggttttcatatttgatgaaaaagagcctaaacgctaactgatttgggagaggtcagctaaagaaaaaggagcattaaccttgactatgcctttagctctagccacctctctaagaggaaattgttgggccggtgggggagggctagttgtggaacgaaactgtaagccagaccaggtgtgaggagagaaggtgaccaaaggtttatagggtaggggagcagaggctggggaagaattgggacctggctaggcctagcgaggaacagcctggggaggaggggagaaatcagatgggtccgtagaaaaggaggattcaaaggactcagagcttggggtggagactgaaggaacagacaggagagaaagaggaaagatttgggatgagtcacattgggagcagagactagagagggactgatgtgtaaagaatgcctggacgtcaggcacctcagaccatttgcccattttacgacaaaaattatctagatcttgtaggatggataaatcgaaagtgtcattctctggccacttggaactattgtcaagtttgtattggggccaagcagtattacagaagaaaataagatgtttaggtttttaaaagagtgcataaaagaatgttgtccaagtccatgcccttcttaatcaatatgggagctacccactccacattaccttcttttcaagggcctgtttcccttgcctccataactgttgtgggtattgatggccaggcttataagccccttaaaattaccccactctggtgccaacttggagaggtcaggtgttagtcaaaggtgttttaagttttaagaacacaggctaagggagaagaagggggaatgaagcgtggaaggttgcccatagtgaaagaggtaagtttaaagagaaaggtagagacatggagaaggggggaggtgagcagccctgggctgtcatgtgggttagcagccaaagctggtgtcccagcaattgacttaccaccaagggaatgtgggtgaatgaccaaggcaggcatccccccggtgatcagacaccaaatggaatgtgggtgaaagatcaaggtaggtgtccccatgatgatcagacaccaaaggaaggctgtcttcccaaatccatgatccatgttggagtttttgagttcatggataaaatgtgtctcctttgtctctactagagaggaaaaagaactggaatttgaaggacagggagattgaagggtagggagagaggctgaagaagagagtgaggagaccgcttacccggtttgaaattggtgagatgttccttgggctggtctgaggacctgaggtcgtaggtggatcttctcatggagtgagggtgaggagaggggaccaatctcccgaaggagtcaccctgtccggggtcttcggcaccaaatgttatgcgcatccatatgaagagaccaccaaacaggctttgtgtgagcaataaagctttttaatcatgtgggtgcaggcagactgagtctgaaaaaggagtcagcaatgggagttagggttggggtggttctataggatttgggtaggtaatggaaaattacagttaaagggggttgtcctcttgcaggcaagggcaggggtcacaaggtgctcggtggggagttcctgagactcactgtccagaaggaatgtcacaaggtcaattgatcagttggggtggggcaggaacaaattacaatggtggaatgtcatcagttaaggcaggagcggcctattttcacttcttttgtggttcttcagttgcttcaggcaatctggatgtatatgtgcaggtcacagaggatatgatggcttagcttggactcagaggcctgacaggttgctgcagtgagccaagatcacactactgcactcctgcctgggcaacagagccacaaaaaaaaaaaaaaagaaaagaaaagaaaaaaaaagaagaagaaaaaaaaattttttttccaccaagaatttagtaaaaaattatagggaaaagtgtcactaattcaagggaattgcactgaaaattattcattcattcaacagatatttattgagaagcaagtatgctggtgctagggttacaacagcgcacaaattcttgtattcaaggaatgaggtaagagtatgcagataggagccagagaggtcaagaggcaattgcaacatagagtgacacgtgctccagaacacataggagggcttccaggccccatgctgggctatcagagctggcttcctgcaggtggtgtggctcagctaaaacctgagaaccaagaatgagccttctgatatctcagggttaaatcggcacaaatgaaaccattttataaccaaacaacattttccctcctgaactgcactttttctagaacccatttaatccttcctaacatgttcaatccagccccgtgatttttcagtcaaatgcaagatgcgtaggattccttttctgttcagtgctccccagccaatctttttcccttctcccaccccacagttactaattccagcgtttcagttctcagcagaggatgacagttccaccaggagacatcagtgttatctggagacattttagttgtcccagctgagggcacagtgctgctggcatctagtgggtgaaggtcaggaatgcacctcaacatcctggaacactcaggacaatccccagcaacaaaaacctacccatccagaacatcaacagggctgtggctgaggagccctgctctagtgcttcctccttactgtatcctcatcaaggagggctctggggcatgtcaggggctgctacaggctcctggcagatttcggcgacttactccagacttgtggaacattcaggattcttagcatggccacaggagagtcaggctgtccacaagcactctctctttcttcacccactcattcctgtcactctaccatttccactgccttcccaaatgcccatcgtgagtcccaccaggggccagaacaccactctctcaagcctccccagtggcgcgtgcacacctggagaacatgtctcacatcccccagccagcgagacgtcctgagattccagcacttctcagtgtctttcccagcttgtttgtatctggaatggggtggggtctctcacacaggagaaattacaaggaaaagtgtacgtgacaggaatggaggaatttctgtggaaacggtgtgtgagaaaatgtaggaagaaagaaacttcaggaaatggtaagtggcatcttgagagcagaaagtgagaagggagcagaaagaaatggggctggaacctgggaaggagaggacaggtggggatggccttgcacaccgtgggcactgaggagtgtgggcccatggcatgggtggagaggagtttcaagatagggagtagattcctattttgaacttcggattgcccctggcgatgtggagactgtattggaagaaggcaagaatggaggagagcccctaggtggaggtttggcaatgctctctccagaatatagcagaggcctcttccaaggtaggaaagccctgactggagagaagttaatggctctgagggctcaagggaggacttggattatcaggacttttagggaggcatatgatcaaggcttgggtcttggcccattgaaatggggagcactggttttaggatgtgggtcaattagtttggttttcaggacaggctgagttggatatcctgggggacctccaggtggcagtgtcaggggaagctggatgtgctgacactgaactcagcagagtgactgagtagagatcgacatctggggtcacaggcagtggatgccgtaggggtggactcaatagctcaagcagaacccggaggaatgcaggcagcaaagggagccctaaagaacagtgaggagatgtgccaagaaagagccaaatccgggggattggctgtgggagagagggctgtgggagtaagaggaagtgtcagcaacgtcaaatgttgcagagacatagagtaaggtaagagtggaaaaaacatccatggaaccctgtgatgcaatcggaatgcagaaagactttgtaactcctgcctggtctcctcctctgcccactcatggcaaaggaatacaaagtaatgttccctccttccgcctagaaaagcacaacttctgcccccaagccctgggctctcctgagaggacaggaccagcctctgaagttgaaggtcctggttctgcccccaagccctgggctctcctgagaggacaggaccagcctctgaagttgaaggtcctggtttaccagatagggaaggggccctttccaagaccctttccagaaggtgtggctgagatgggaaccgtggactctgtgcagatgtaggagctggctccagtcaagtgctaggaggttgtgggtcctgggaaggaagaggctctggagcctctgtggagactctgggactgtccttgggggagacgtgagcaggaagaagcagggccttcacagtccccagcttaggggcctcaccacccagactgaagaccaggaccaaaccctttcctgcacagttacaatgtgtcatttaattttactaaagggaatattttttaaatgaggatgctactttgtgtattaatttttacctctattcataaaagaaacgtttcttatctatttaagatgattcatatcagaccagtgtctgcccaactcgactgaccctgtgaaaactgggcacttcacactccaatgatgatggatgagtccccagcagcatagtttaagggagtgagtgggcagtgtggcctcctgtgcacgtgacttcctccttcagtgtgcccacatgtgggttccacggtcttgtgacattgtggctttagaaatttctgtttccattttctatcattcagagtaaatgaaatttgcaggaaattcagaaccttccacctgtacagtggatactgtgagactctgcccagatgccctcttcaagccaatgcatctctccatgctcccactcccatagatgggaacagaggtgctggaactcagatctactcccctttctgggaactggagctgcctgcccaggcaatgcccccttcccagggatggctgagccaatgactggctaatgttggattgcagaggcctagcgccctcccctcaattcctaattccttgtaggaataactgaggcctcctctgtgaccacgtgggcagcttctccctctgcctggtcctgtcttgttctctcctttccaattgtgtctcctggaagccctccccacaagtctgctgcatacaactctccttctcagagagcctgagccctggattcccaggaatccagcctaaaatagtctggcatttggtttcaattttctctttcactaagactcagtcacaggtgctaataaataataaaatgtcaccaccttgaattctatcactctctcttttcttgccccatctctgacaagtaggtggtccctcaagaacctgaaaagcagacattaggaggaaaggaggagtgggggcaagaggcccacacctcacctggccggctcccatccatgcgcccttgactgaggtaacacctaccctgggaatccttcccctgcctctcgtgagccaggccgggtgctcttgggacagctcccactgctcctgtgtgctcccccagcttggcacatgactccctgaattatagtcagttccgtacctgaatctccctctagaatgccagtgccacgaggacagaggacggttccactttgttcactattttctccccagggtctggcaaagttcctgggacttgggagaggtgtccttcaggagcttggcagaagccaaacggcacacttaagtagggcaactgaggtgagtttaatgaaggattctatacaaaaatttggacaaggtatagggaggccacaatacacagtgcagtgcctggtgccagtgagagcagggcactattcccactgcaaggccagacagggcaaggggagggagctgcctgacaagagctgcccttacgtcaagggacacatcagcccactagaccccatcaggagggagccagggcctgactcccctgaccttgctctccaatcttctgcctaaaattccccatcagccaaacacaactgaaaactgaaagacaggggagcctgctgttaataaggtgagcttcccccagaataaagctgggtagagagtggagaatggatatggaagggcaaaaggaagatttataagacagtgggcactaaatatctatgagatgaataaaggaaccacattttacaacaaacggtcattgaaacgctactcaatggaaagagatcatttcggtcactgtctggtgcagacaaatcaaagcccacatgcatcaaaaaggccatgtccgtgtaactccgacacggggcagacagcaaggctgaagcctatggggtatgtggagccggaactgagagatcctgatgtaaatctagcacttgggaaaagggggactagaagaaattcacccacaggcagaggaaaacacaaacacttatctatttttgcctaggctttaagtggtatgggaaaaatctctgagactacaaatcctgtgcttcatgcacaggtttataataccctcaaaatggaagaccccaaaaccaggcgcggaaaattcatatcaggccattgatgccctcaatgttcccggctgaaacaaactcaaaactcctctggaaaggagtgctcccacttcaagccatgaaaagctactgcagagaaaataatccccagtcaagacacactcacattgaaactgcaaggcacacaaggaaatggatcaccttgagtgatagctggcagagctaataaacctctgtatacctctaagaagctccacgcactagtataacccttaaagatttgatgaaatcattactttattaaaattgtttttataaaaaatcaaaatccaaaaaaagcaacaaattttataccagagccaattcggtatatacaagggtgtcttactcttttggaatttgtcttattgtcctaactcagcacattgtcctggtctatgaaaagtcctagaaacccttctaccctctgtaatgtaggagctttaactcaatagggttttttaaattcttttttcttgtctttttttcttttttaattttttccattttttcaagtcaaactgaagaaatatttttcttttctttctaggaatgcatattcaccccccaaggccacttgtctcctgattggagagtattagacaattctcaggatttctttattttccttctttattccataggattgggaaacccagtaggattgggtttaggcatatctctaaagcaccatgtttcaacgttttgatgtaagattgtgccctatttcttgttcagttgctgccagcagatgttatagttttaaaactagtttttggtcattgagatattagaggagggaagagtctgctatcctgctttactcatcttcatctacactacactgtcatcttcactgcaaagtcctgtattaatgtttttagattctataacattttaacaggtgtcaaaaaatcttaagcaccacttcagcttgggaatctctaaatgtaatggtgtttgtgggctggactgatgtctgcgtcttgttgttgttattgtctgtagtaatggagagccgggagatcctggacacttcctgttcatgggcacttgatgcattagctgccccagcagctgattacatttaaacaaggatgtgtgggtgaacccagggagaccaatctcagtggaatggtgggggcagaagccaggctgcagggtgtagagtagggaatgagcagtgatgaagtagaaacagagtttggacaactagtgaaactgcctggaagagggggagaagagacagtaaatggtctgaccaatgtttgaggtcaaagtgggtttgtaatctttatttaagggacagatctgagcatttaaaaattctgaataatctaatagagaggaaaaagttgggactcaaagaaaatgtgggaaaaaatgatgaaggttaaacggaatgagatccagagtgcagggggagagattagcctttggtgttagaggagcaactctgtccatggagagaggaaaaatgtagacataccacagttgcatttgaagttggggcctgaggagttgaggagttctgagaaaagcagaagatgagatcatttcctgagagtaaatgggagtcattagaacgggggtgaagagactggaagctttaggtagcttgaaatagttgatggaaaaattggataaagtgacaatttgtcacactcagaacagctatcagggaatctagaagaatctctggaagctagttgaagatcttaaattaccaatgtatcttgtccacatagctaagcggttttacttatttttatttttttgaaacagggtctcactctgtcacacaggctggagtgtagtagtagtagcacaatcacagctcaatgcaatctctgcctcccgggctcaagcaatcctcccaccccagcctcccgggcctgggactacagacacacaccaccactcccagctatattttgtacatttgtagagacagggtctcgccatgttgcccaagctggtcttgaactcctgggctcaagtaatctgcccacctcggcctcccaaagtgctgggattacaagcttgagcccggctgctaagtggttttaaacagctgttctcggaaacacacactcaaagaaaaaatgtagaggataatttatctaaggctggggcttcaagagaggtcagggtgttgacaagagaatgactaagtggcagactactggatctcagctagataaagagggatgtgatcgtgggaggggctgatagtcagaggctggaaggcttgatgaacaacacatattacacaaagaataaatggagtgagagaaaccaaaggagtaaaagttgtcatcagaaaagtgagaaattttattgtgagaattcagtggtaaatcaatgttaacaaacctcagctgggcactagtggagtgaaaccgaaggccagggagttgagttaatgagctgagacttgggcaccagatgggggtccacatggacaactaagccaccaggatgatgtgggaaactggggtgaatagaagccccttatccatgtgcacaagtcttgaataaaataggggcaaccaggcagtcagtggatgatagcagtgaggtggagcagagagcaatgtagttggagaagtggagcccacagcagtctcctttatatctagaagggaattaatagccaaaaaatggcaccgaggccaaggatgtcaccttctgactcccaaatctgagacagatgtgagagggaaggagtatcctcaagggacaggagatggtgcgaatgtttttggcataaatcaaagatgtcagggaaattgtcagaattcaggttccagagacacagaggaaaagcgtgggagaaagtggaatattgggaggtgagattagggcagaggaagcacaaatcaaagaacgaggaatagaaaaagtcatatgagctgaggagttggccaaacatgacagaatgggaatatgatggaattaagtggctttatgtgttccaaaaggattggtccacgcaggccacaggaaaatgggaggtaagaagaaagggatcgaaatgctgcaaagtgtattacttcatggtaagcaaaggactcaagactctagaaaatgatgcccttccttccaagactatgttagtccaaatctttcaagatacagaacccaaggtggggtctggcatacaagaagtataatagaggaaatgtctgtgacatttgcaggactgcaaagggagccaggagaagctgggaaagccatgagatcacaagcaggtctgactccaagtgaaggagatggggaatgacgcaaggtttggctgaagcatgtgccaaaggcacccatcagaggagtccctctccaagggatgggcctatcatagtgtccctaatagtgtcatggagtgggagcagcccacggagggcacagccttggcatgaacgcagacatgggtctcagagtgcagcagctgggcccctcagtcaattaggctccctcagagctggggcaggaggtgcactagaccacacagtaatatttatttattattaatttaattaataatattaatttattaatttaattaataatatatttatttatttattattactagaccacacagtagtatttgtatgtctaaggaagcatttctcagaatatactcactgaacttttagcctataagtacctgtatgaaaattttaaaaggggtttcatgatcaaaacattttgggaaacactccataccctttcttcctcatgaaggatcataatgcctattagtatatgaagggctctgagaagtcctgtagtaaagaaacttgctttagttttttagtccagcaatttttcaaacttaaatgagcaatagcctcccatccttttttttacactttttagcatactgcggaataaactcaacatgcattgagaaagactgctttagggaatagtcaacactatttcactcccagtaagtacatataaaatctgtatttccagggtggattatcaacacagctgtattttagaaatattatctgccctcccaggtatcacagctactaattattgggtactgaggtggaattttagggatcagccaattatgggaaagaaaatctgggggcaggataagatggtctccgaagccttaaaattatatgccattatttacctctttgatctactactcaatatcaaacaactaattcagaagaaaattgattgttttctaaaagtagtttttctacatttcccattaagaagcagtggtatttaaaacttataatggctattatgtgagattatcactatcatagtttttctctatacaaattttctgtaacattttatttgctaataaaaattagatagatggattgactaattgataatctaagaaagattatatttgaagaagccatagtaagggacagattaaattatcatcagtctaaacattctaatacctatttctctttttttgaaattttccaaatttgttattatgcatttaaacaataattttttgaacttttattttaggttctggggtacatgtgaaagcttgttacataggtaaccttttgtcatgagggtttgttgtacaaattatttcatcactcagctatcaagcccagtactcaataggtatcttttctgctcctctccctcctcccaccctccagtctcaagtagacctcggtgtctgttgttcccttctttgagttcatgtgttctcatcatttagctcccacttataagtgagaatacaaggtatttggttttctgttcctgtgttagtttgctaagggtaatagcctccagctccattcgtgtttccacaaaaaaacatgatctcgttcttttcatggctgcatagtattccatggtgtatatgtaccacactttctttatctaatctgtcattgatgggcatttaggtttattccatgtctttgctactgtgaatagtgctgcaatgaacattcacatgcgtgtgtcttcatggtagaatgatttatattcctctgggtgtatacccagtaatgggatttctgtttttagctctttgatctaatacctatttctcaagatcaagttagatctctaaaaaaggcatcatcctagcatttccccatcccttccctgaactaaatttaatgttgtgtgtatcaatcagcatacagtcaagacagaaaccacacatgaacattaaatataatgagttattaacttataaaagggtatgaactactaaagggggtaaggagaatgctgaagaatgcaggaatggcagatgtagagagcagccataacctctaagctaaggcacagcagccaaggaaggggcgaactcaaaaaatgccctccctccccagctgatccacccttgttggagggggtgtggctgcaacccaatggatgcccaagaagtttgcagagttgtggcaggttggggctgctgagcaggaaactgcccgaaggggtaccagtgagattcccaagaatgtgggcatgcctctggcgaggaagacgctcttggagtgccagcaaaatttactaggaagctacccagtagggtgccagcaaaagtcagcaggaagccactgtcgtggtgtcggcaaaattcactgaggagtgggcactgcagggtctccacccagcactggcaaatcagccaaaagaacaaaaacaaaataaaaacaaatcccagaaccagaaagaaaaaactctgcctcttactgcgaccctcttatgccttctacagcaactggcaaaggagaaatgtttatggggtccagctctagactcacaaagcagaacacagaagagtgaatgaagagctgaaaggcgataaatcagtaactggagcctcacatcctttgccttttttattgagggtcaatatattaagaagaatatgtctgcgtcttcggtaaaattattgctaaggttatcacccagtgtgtgttttcaacctccctgatataagaacttagtgacaagaaagaatgagacaatgatcatgaactattggacccaaccatttgtggctttagtgcccatcttctcagcaaggctttctctctctctctctctctctctctctctctctcttttttttttttttttttttttttaagatggagtctcactctgtcacccaggccggagtgcagtggcacaatcttggctcacggcaacctccacctcctgggttcgagtgattctcctgcttcagcctcccgagtagctgggattacgggcacccatcgccacccctcctggctaatttttgtatttttagtagagatgaagttttgccatgtcggccaggctgttctcaaactcctgacctcaagtgatccacccacctcagcctcccaaagtgctgggattacaggcatgagccaccacagccagctctcagcaaggctttttctgactacactatttaaaatgtgatccctgagccaccttggcctctcttgctgtccttccctgcttcgccttctccatagcacttctctcctactaatctacaatttacttgagctctgtgaaggtcaggatttttgcctattttgtccattggtgcatccccagcacctggaacagagctaggcacaggctaggcactctagaaatacttgctgaataattgaattaagtaaatgagtgatctacacgtagtggggaatgagagtatacagtgatagttccttcgactaaaactggggtcaaattatagtgataaagaggaactcagaccttcagaggtaagctttgtggaccacttgccaaggctgcagaatgtgatgtcgtttcacaaacaaggaggccctattatggcttcagatatgagaataataaagagaactttcctttcgcctcaactgcagccttctaaactcttccttccttcctatgtagaagtttcaaggacctcatggcctgagtgtggataggcagaatgctgggaatcaggcaaaaataaaataatactgaaagtgaaggtcatgctaatattagtaagccagggtgatcctgaatttacaaaacatttttctttgggaaatttcacacctcacatgattctgtgtttttacttgggaaatttcacatctcacatgactctgtgacatgcggtacatgaggtgcctgactgctgtttttgtcctctactaatgaggaagagtgtgcgtactcccagcgttttgcaagtttcaaagtctgacttgactttccttccttttcctggaactgatccatgagtatcgagagtaaagctgcccgcacctactcattcaagatcctgagtgtcctgcccagctgcaggaggtggagagacccaggaggaggggccactgctgatcccaggctgtagggggtgggaagagtgtcccagggcaccatgacccccactcactcactcacaggagacccacacaagagaggagagggcacttacagcttaggttcccaccagcaccaactcctctgccatcaaacatcattgtgtttctctttctgccttgtctgtcggcacacgtggagttaaatttaatgctcaatcacatatttgtctgggctctttctgtgtttatttttctcttaatagttctctctcctcccttcctctccccgcccctcctcctccttcttcttttttttttccagagacagtgtctcgctctgccacccaggccagagtgcagagtggcatgatcatggctcaccgcagcctccaactcctgggctcacgtgaacatcccaccttggcctctggaatgtctgggattacaggcacttgccactgcatctggctaatttttatattgtttatagatccgggatctcactatgttgcccaggctggcctcaaactcctgggctcaagcgaccctcccacctcatacttctgagtagctggggctgtaggaatgcgcctcagtgccaggctagtttcttaattttctatttctattttgacaggtacaaattttgtattcaatcctacctcagacacatctttggtgggaaaaggatgtcatttaatcaatatataaattctaagcaaataggtctgatccccaaattaggttagtcacagctgctgagtcgttgacccaagagaagctcatctagattttttcattattttcaagttcctcttctcggttcgtccttcttccagaccatgccctccccgtcccactctcttcccacagcctcccctccccacagcctcctcccaccattccaaatctgggctgttctctcaatttccttctctctggactcaaacctaccctagcccccagcctcagtttggggttaaacttgtcctcctcacattctctcccacccaacttgatgtcgcctctgtgtcatcaccacgggattttcctcctctgggttctccttttccgagtggggtcagctcccccatgagtcacagcaccaatcacttctggctgcttgcaaacccctttgctttcctcagtgttgacacccagggcagccctatgctcactgccgctgagaccccacctctgcccctggccttttcccagctgacatcaccctgtggcttccattttcctaaaattctcttttgaggcctcagtcttaaccaaagcacacagtgcccctcaaaaatgacaataaaaacccaaacacaccgtgactgtcatggcaggttcctggtccccgtattgaatcagcgggtgggtttctgcgaacactggtgagaggccgcattagagggtcaggaccctcaggtctggactcgtggtcaccacataccttcctccctgctgacagtagctggtacctgttacctactcagagtgtcacatgccacaagccagagcgtcttggcagttctcagcaccttgacatcacttccttgctaccactcagagcggcagtgacacagttcccttatctcagaaggccagaagacggctgtcaaaggtcacagggaaatcaaaggcggggtacagggccagagggaggaggaaacaacttcccggttgctttcagacgcttcagagatcctctggaggcctgggggagcttttgagtactttatttcagttggtccctgagctcggtgagtggggcgggtagagccaccaggggaatcaacagtggtttctcgtgcccctcagggtcaggagcagtctgatcaaaaggagggcatccactgtccggggccattcccacagctcccggatgctgggtctggaggctgcgcccttcccctgcaggagctcagcccagtggtaagtcatctgtgtgtcatctatgtatttaaccccttatggccatgttgatgctgagcatggtttcacttttgcaaacatttatttatacccttcgagagaaaaacgtctcagctgtcacaggaagctgcttcggggggtgagcaaactttttaaaatgcagaaattatgatctacacccgtttcttaaaagtaagccatcgtacttggttctctttaattatatattttcttacatattgtgttcatgtaggcaagtcctgtttctgctaaaagaaggtaagttctaccaaggcggtgtcatgccagctttatttcccgtggcacctggcacactgctaagcacttacatgcttaacaactagattgggaatggtgctgctctggggaagtgggcacacgttaaagaaatgtttatttcagtcttctgaaatagggaattactctggctaaaatgtagctccagaaagggaaagtggggctgtatgaatccaggtccagtttgttgtttcctccaggataaggcagctgtcggaggggaaaatcatctcccatttctccacagggcagtctgaagatggccaattacacgctggcaccagaggatgaatatgatgtcctcatagaaggtgaactggagagcgatgaggcagagcaatgtgacaagtatgacgcccaggcactctcagcccagctggtgccatcactctgctctgctgtgtttgtgatcggtgtcctggacaatctcctggttgtgcttatcctggtaaaatataaaggactcaaacgcgtggaaaatatctatcttctaaacttggcagtttctaacttgtgtttcttgcttaccctgcccttctgggctcatgctgggggcgatcccatgtgtaaaattctcattggactgtacttcgtgggcctgtacagtgagacatttttcaattgccttctgactgtgcaaaggtacctagtgtttttgcacaagggcaactttttctcagccaggaggagggtgccctgtggcatcattacaagtgtcctggcatgggtaacagccattctggccactttgcctgaatacgtggtttataaacctcagatggaagaccagaaatacaagtgtgcatttagcagaactcccttcctgccagctgatgagacattctggaagcattttctgactttaaaaatgaacatttcggttcttgtcctccccctatttatttttacatttctctatgtgcaaatgagaaaaacactaaggttcagggagcagaggtatagccttttcaagcttgtttttgccataatggtagtcttccttctgatgtgggcgccctacaatattgcatttttcctgtccactttcaaagaacacttctccctgagtgactgcaagagcagctacaatctggacaaaagtgttcacatcactaaactcatcgccaccacccactgctgcatcaaccctctcctgtatgcgtttcttgatgggacatttagcaaatacctctgccgctgtttccatctgcgtagtaacaccccacttcaacccagggggcagtctgcacaaggcacatcgagggaagaacctgaccattccaccgaagtgtaaactagcatccaccaaatgcaagaagaataaacatggattttcatctttctgcattatttcatgtaaattttctacacatttgtatacaaaatcggatacaggaagaaaagggagaggtgagctaacatttgctaagcactgaatttgtctcaggcaccgtgcaaggctctttacaaacgtgagctccttcgcctcctaccacttgtccatagtgtggataggactagtctcatttctctgagaagaaaactaaggcgcggaaatttgtctaagatcacataactaggaagtggcagaactgattctccagccctggtagcatttgctcagagcctacgcttggtccagaacatcaaactccaaaccctggggacaaacgacatgaaataaatgtattttaaaacatctatttaatgtattttaaaataatttgtaagttgattttaaaaccaatttaactacattccaaattatagacagcccatttatatgggagtaacttttcaggctcattgcctcgccggtgatgagaagaactagctagctggaagctgtgggaaaaagaggtaaggtaacttgttctgtcgaagttctctaaattctcttgcttacttgccacacccctaggcccccagcttcccctaacccaaggtttctggtattttctcgtactttatcaagactatggaatcttaggagacttaacaaaagcaaatgagaaattatgtttagaaatgtctaacaaaatgaattctttgtccttttaagtataacacatacctcaggcctcaccagcacataactacaaaaggttgtcccacttcctttctgtggctgagttagtagaacacaggctcccacctgccacatcagcagaaggtcacctcaacatgtgagctacctccccggagaccccccagatccgtaaggatgatgcatccttgatcctaaaaacattttcctgttcctggtgttcagaattggactccacactcactggtctctttataatcttgcttctggccctttgaggcctcaaagctaccagggccttgctgccaggggacaatcaccgctcccggctgagtcctgcagacatagggcctgggctggctgcctcctcctgctggcccagcatcttgcttgcactaaagagagctggaggcttggcactgatgcttgctaaaaacctacccaggccgcccactgctgccgcactgcagggcaccagcccacactcctcccctcctggcatcaggcacacgttcacggcactaaaccttacaggaaagcagtggaaccctgtctttccttcacaggaggcactttccttcctaggcaaaaacgatgatacccatgggcacagcatctcacatagggacacatagagatgtctgactcattaaaacccaagtctctggccaattaaaaggggtccttaatgtcctactcaacagtggtggaaggaaatttgctctatattgatgaaatgaggtggagaaaatctgattttccaaacatgagaattctccatatgccaccccataaccaaagaccccttatttgtgttagatgaaacattcaaagagcctattaggatagcggatgagacccccaagggacatgcttatacaacaataactggctccaaaccacactccatggcagtggctctcaaatgccagctcacatcacaagccctgtgctaaaacacagagttctgggccccatcccggagtttgtggttcaggaggtctggagtgtgacctcagaatatgcatttctaacaaattccccaggggatgcagatactgctgacccaaggccctccttctgagaaccactgttccagggagaagaaactcagctaagtaagggtttggctttgtgctgaagacaatgtggaatttagagttggggtgaattattcaggaaagtagagaggtttggagatgtgagggtgggaagcgcagtggagggaggcagagaggaaatatgaagcagcgtcagttggagagaaattaggaagaggaataaaatgatatatgccagggatttcagttttgctgagcccatgatgacagactcttctctggcaccttatgccactcattgagggcttgtagctggctctgctctttcagagtcataatagggctatgggtctgacctcaaggtgagctggaatgggcacaagtaatagataaaactgcaagaagtcactcaagggtccttcctagaacaaaggatccctacattccaaaggcgaatgccggtcactatcataaaagaaaagaaagaaagaaactgatggtgacattttaaatggcaatttttctagcttctaaaaggttgtggagcaactggaactttcataccctgctggtgggaatgtaaaatggtataatcactttggaaaaattggcagtgtcaccaaaagcaaagcctatacctactatccatttcactcctcagtatttacccaagagaaatgagcatgtatgtccatacaaagatttggacccaaatgttcatgacagccttatttatatagcctcaaactagaaaaagtctgtctatcaacaggtgaatggataaacaaatactggcctgtgtatctaatggaatactgctcatccacaaaaagaaacgagctattgatacacacaggagcatgcacgaaatctcaaaatgctgaatgaaggaggccagattttaattttatttttaattatttatttatttatttatttttgagacagagtctcgctctgtcacccagcctggaatgcaatggtgtgatcttggctgactgcaacctctgcctcctgagttcaagcaattctcatgcctcagcctcccaagtagctgtgactacagtcatgcacaagagcaactgactaatttttgtaattttagtagagacggggttttgccatgttggccagctgctctcacactcctgacctcaggtgatccacctgcctcggcctcctaaagtgctgggattacaggcatgagtcaccgtgcccagccggaagccagatattttttaaaagtacttattttgtgattctatttatataaaattctagaaaatgcaaacaaatccatagcgacagcaaatcagtggttgctggagatgttggaggggagaggagaggaatagattgcaaaggggaacaaggaaattcggggggacagtggatatgtctgctattttgactgtggtgatggtttcattggtatatacatatgtcaaaaacgtaacaagttgtatacgtgatttattatgtgttgactatacctcaaaaaggctattttttaaaatccccctcaggctccaggcactccattacgttggtgtgacttgtcttggaaatatactttgagcatttgccggaggagatccagtgcctgggcctctgtttcttctcccaagtagaattggcagctaaaacgggatgcccatgggcacaacttgtcacccccatcaccgaacagggagcagaaggaggctgctgggggtgcccccacagggagcacagtctcatcgggaatgacctgccatggcaaataaaatcaccagggcaagtcaagggagagaccagggaagagagtgatccagtctatattaaaaaaggatgagaaaggttgaagaaaaagagaagaagggacagaaattctcttcacacatttgcagaagtaggtccggactctccatccacttctcctcctccgataggtaggacaggaatctcagaggaaatggcatcatcttcccatgtttacagacacagcaatgaactcaaagaacaatcttatcaggattttccaaatgaaaacatggagcatatagagaataaagatccataaactcgtatggtggctgagactgaaatggttaatgaaaagcaaaagtgtgtgctgaatgacaccagccacaatggcctgaacacttaagtagtgtaatatacttggaacattgacagctaacaaggtcttcctcccatgtcagaccaagaacacagtttcctaaagataaaaatagcacatgcttttccacttttccataagtgactgcattagaaaactaacaaaccatgaaaagcaaaatatggctagtctcttcaagaaaaactggtgtttctattttgtctgtaaattactttctaatacaaaaaacaattcctgttacattgaggtaattctaactagggacatatgagagagagattgaaatctcatgagctgtctccttttcatctcaattctgtgtactcgtgggtacaaatggaactagtttttgtttgtttgtttgttttttgagatggagtcttgcgctgttgcccaggctggagtgcaaaggtgtgatctcggctcactgcaacctctgcctcctgggttcaagcaattctcctgcctcagcctcctgaatagctgagattacaggcgcctgccaccatgcctgactaattttttttttgtttgtattttttagtagagacagggtttcaccatgttggtcaggctggtctcaaactcctgacctcaggtgatccacccacctcggcctcccaaagtgctgggattacaggcgtgagccactgcacctggcccggaactagttttaaaacaggaaacagttgatatactgaatggaaaaacaatacaatttgaagttgaaaaaacaaaataagatgcccagttaaatttaaatttcagttaagcagctaatagttatttagtataagtacaacccatatacgacaattgcagtatttgttatttatctgaaattcagacttacctgggcatcctagtatcctgttttttgttttgttttgtttttccctttgttttcttttttttccccgaaatctgaccaccttaactttaaggtatttattcatttttaaaaactaaatatttttcggcagtcagaactagagcaaagataaatgatcccaggactctgtttagcaggcagtcaggaagtgtgacagtgtggtgggtggcagccccggccaggcctttcctcttccctaaactgccacagcaggactgccacacttgggaatcccagtttccatctgagcagcccctccagagtttggaaggagtcagtgctttagcctgaggagccgtggatggctctaacactttgcttgtcggttgaataaaaatcaacccaaaggtggcctacactcattgaagtaggaatgccagaacttcagtggtgtcacatagaagaaaatatctaagtgcttagggagatggcagtgctagtggatctactggatcattaagactcactcacccacccagcgcaggtctagaggacacacccttgccacactgggaagtgtaaatgagctccagcatctttatttttttttattttttatttgttttattatactttaagttttagggtacacgtgcacaaagtgcaggtttgttacatatgtatacatgtgccatgttggtgtgctgcacccattaactcgtcatttaacattaggtatatctcctaatgctatccctccccccgcccccggtgtgtgatgtcccccttcctgtgtccatgtgttcttattgttcaattcccacctatgagtgagaacatggggtgtttggttttttgtccttgtgatagtttgctgagaatgatggtttccagcttcatccatgtcccgcatctttaaaaaaaaaaaaaaatctctaagtggtggctcttctctgtagatcaggagctgtagtgagcaatgctacaaaactggagtttctaaatacaggggggatggtgggattctgaggaaggacaggccacgtggtaacacttacaaaagaccaagtgggtgtggttgccactgtggacggtggagccaaagcagtcctcagaatagtctgacccccagaggtctttggcattggctggttgatcatggtgtccctggaattgaaatagaaggacggtctactaaatttttacctgatctgtataagcagaagagttctatctctagtgaacagaagtctaactttagtcaccagaactgagagtcaattcaatcaattcccagatttgacatagtttatagacctagaaccccttgaatgaaaggtaagctggctccccttgaggaaggaccctgttacatttccggcattttattctgataatcttttttcccagccttccccaaagcaacttagggccatttaccagggaaagccatggaggaaaaggaaataattaggctatttggagattccaggacactggctctacgctgacaccagttctaagagacccaaaatatctttgtggtctaccagccaaagtagggcttcatagaggtcaggggtcactagagtttgagctcaggtctgtttcactgtgagtctagagggtccctgaacttatcctatagttattcccccagttccagaatgcagaattgagctgagagcagtggctcatgcttgtagtcccaacactctgggaggcgaaggtgagaggatcacttgagccaagcggtttgagaccagcctgggaaatatagtgagaccccatcttttaaaaagacaaagaaaaataaagaaaattgacatggaaaaataatataaaatgtgaataatctcacatctactaaagaaattcaatctgtaattagaactcctcccacagagaactataagcccagtgcccccatcaactggagaaacagaaagaaacaatcttcttaacagaaagcataattggaatagagatactctgcatcggggaagaatccccatattgattctctgatccatagagtgaaggccaagtggaagcctttggaactccctctacctgccaagatactaaacaaaacaacactgcacgtctggaggaattgtagcaagaacttgaaagatgaaggatgatgatgtccacctctctccattcagctcacctatctggtttgtgcagaagacaaataggtgttggaaaatgacagtggaccagtgtaaacttaatcaggcgggggctccagctgcagctgcaggatcaggtgttgtttcatttctgcagctaatcaacccttctcctggcacctggtgtgcagatggcaatttttcttttctattatctgttagtaaagactatcagaagctgtttattttcagttggcaaggtcagcaatacactccaagggaagagcagtctgtctcagatcttaccgatgcctggggatagggagggagtggccccctcaccgtctccaaggcctagtcctctgctcctgctactggcagcaaatccacgcaggtctgcaacaacctcaattcctgcctcctcagaagaaagaattcaattgagggacgtaagacagaaggagagactgaggcaagttttagcacaggagtaaaagtttatttaaaagctttagaataggaacaaaaggaaggaaagtacacttggaagagggccaagtggacgacttaaaaagcaagtgcgtggtttgaccttttgacttggggttttatacgtcagcatgctttcggggtcttgcgttatttctcccctggttcttcccttggggtgggctgtcccatgtgcctgcctgagcccactggctcaactcctgagatcttatagggaaactactgctcaccagtttcgagtgttttctatctattaggagccggcttttccctgttgccgggtgtgaccaattattactttagaaagacagtcaacaaccgccagaccatcacctgatggtcacctgacactcctggtgtgtggggtatggggagccctctcctgccctgctctttctgactagctacccactataacactcccagagggacctgcacattttgtgctctttgcaagacagtgcctgcccagcacctgtaggcctgctcaccccttcagggtcatgatttttgctttttaccgcaggtacccataagcaaaacatggcattgttcaccatgcttttacattattcacataattttaagttatttacacaacaatgtaaaaccatggtgaaccatgccacatgttgcttatgggtacctgtggtaaaaatcctgctactagctcattttgcagtgtctataatgacaggtaatgctccattcactcctttatgacacttgcaaaaactgagaacataacgcctcccagttaagcaggcatctgggcaatgtgaggagaacagaaatagaccacgctgcatttatctctcttgatgacaggcattgagatttccactttttctggtttcttattatgtctctactgggcattcttacatacatcttgcacgccatggaaagtttctctagggcagtggttcacaaactttttggatacagaatacttttatgtgcttgaaaactgaggaccccatacagctttagtttatgtgggtgtaaggttctagcccaaactgaagtccgaagggagttggtgggtgggtgaggggtagctgaaaaaacacccgaggaatcataggcagtttgaacatggccttatcctctctctgggcacgagccatatgtccagtgtcagcagggtaattataccttttacagacaatagaggctctgaagcaatcacgagctcacgtgagtggtcacctaatgcacctcaagtggcatggttcataatgtgcggagtcgtgtgcctacgctccaaacccactgagtcatggtgcaccaaaaagtggcctcagcctgctcctgactaaagcgcagccatcttccttacactccacccctaggccaggggcatcctccaggtagggacatgtgcccgtagggtggagccctgaatccataatccacagcaacaatacggagagcaacagctcatgactaggattccagctatgctacttatgactatcagggcccagcgtaggccagagcccagggatgtctaccatctctgcagggggtcatcagtaaggctcttgactaccttaatctcctgtgagaccccttgcagggctgctgttatgttctgccaattgtcagggataaaggtacaacattgtgttcctaaaagggcacaggtgcctccttaggcagcagttactatgtctaagaccattcggtttcgcaacaccacctttctgatctgatcaacctcatccattaatgggaagagggccactcaggtgtaattcagagcctgagcagcatgctctgcaagagcagtaacttggcttctacagttgtgacacacactccagggctagtgcctgtcaaggggtaaaaccaccagggtgctcattacacttgcaaaaaccgagagtgtagcacctcccagttatgcaggcatctgggcaatgtgagaacagtggcaggtacatgaggccaccctcaggtataatgtccagtccagtttgcttataggtaaggccaccctgtgtccccacagacccataaactcccagggggcacacagtccatcgaggccccttggtggggccgcgtcttccaccatacctttggtgtggtgacatgtattatgcttacacacactgtgacgggtacccatcccacagtgctattaccccagtgttgctatatgcaccacagtgcctgggccaggggtactgcacgttacctcactagccagccccacccatcataaatgctatgggccagccagggaatggctgtgctgtgggtcttgtggcatcctttgtccaaaacttgccacgttgcgttccaggcatcagccatgggaccccaagtctccagccatgtctggttctctgcagatgctgaatgtatgtgctaaggcaagccatctgcagctgctagaagggcggtgcagatccaacagttggaaacattggtcacttcagtgtaggtgtgggcccagtccacaatgcagttggagcatgttaacctacagttggaatgacagagtaggcataggtactaacagaggaaaatcacatccctcaggtaaaatacaggctaacctttcatccctggataacaatgcagcccccaaggggttctgccctgggcaatagtaccacaccttttcagctccccatggttcctttgggtcctgtattcatgcgaaagtcacaggggagcttgtagtaggccacacagacagtacatttgaaccctggaggaaagtttcttccctggccgttttcctacaaacagttaacttcggggaccattcattgaacacccaaagagtgacatacaagtcatactgtaggccctccccacagggagctacgatggacaaccaccagcagccgggggcttggaggggctatggccacagccaggttttctgttcccctgccttcagggacgttggggcaggcaacaacaggttactgttcatccccatacctggtcagaggcggttacccttggtgtgtatctgcaactgaataggggtggtggcccatgtaacaaagcctccacctgggctgggctgcttttccatggccattcattcaaggtttggagcatcaggtccagcctggaacttcagccctgcaaagacaggagtgtgacatgcaagtaaaacccattcttcaagagctcgctatatcactcaatcatacccacagcttgcaagttgtgcggtacatggaatccctactttatgtccattgttgtgcctgttgtccagtaaaatgtgtcccccatcactctcaatgaccaaagggcaaccatatagagcacataagtgttgcagggtctggatggtgtgctgttggttggccaccctgcaaggataggcaaacaacaggcctgtggctgtgtccacagctgttagcgcatgagtatacccttgtgacttcggcagcagcccaatgtagtctacttgccacctggtcaagggcacttgccctgttgtcacttgtgtagcactggacagctgcctccatttagggtatgcctgagcacatgccgggcatttctgacaagcctcccaaatgtcttgcatgggcagagacagaccccaacatttattgacttgttgcatcagtttaccccctgcatgtcccagtttccggtgtagctacaaggccacatctcatgtagatgccaactctaaccatcggaccttggccaaggcttctgcctcgtcattgctgggggtggccagaggcatatggcctgacaaatgataaatagttacatctttgcaatgacccatttcccagaggtcttgctacatgggttggtggccccaaatgggttggtggccaactagccaattctgtattttccaagtagttaaacacaaagttaggcctccatagactgcccagctatcggtacggattaccataggtgtctccgccttgttgatcaccatccatactgctttaaattcagcccattgactactttgtccacatctggtttcaaaccatatggttttggtactaagttggactgcaacactggtccaagcaggagtagcacctcgactagacccatctgtgtgccatgccccatcaggaatagagggatgcccttccttaaatggcagtggctcagggtcaaggggtgcctcaggccccatggccttctcttgcattaggactgcaggtcccaagacctcttgcaactctgctgctaatgggcttgtgctcagcgtactctgttgctccaagtaagtgcctcactttgccaaagtggatgtctgcaccatcccagtctggggggtcattacacatgaatgcacccatcccgctgtcaggtaagtcatccacactgtgactgtagcccatcctatcacttctcacaagcctgaagggcagcatatacagctgctagctatttctctatcaaggaataccagagctcagctcctttccatagttgggaccaaaagcctcctggcattctcaggcactctgtgtgctgccacaggcccaaactaaaaccatctgtggtcacatgcatatccagttcaaatgggcaccccttgtcaaatacccacagggctcgtgcctgctgaatagcccacttggctgccaggaagccagtctcagccacatcagcccaatcccagattgctcccttctttgttaactgatacaatggttttatcatttgagctaaatgaggcaggaatgtccaccaatatcccaggaggctcacaaaagtttgcagctgcctcaccgtggtgggccagggatatgcctaaattttgtcaatgatagcctcttgtatggccttcatcttacccgaccagataactcccaagaatttagcaggtaatccaggccctcggaccttggatttgttgatggcccaactgcatgctgccaaatgttgccacaagaggggtgccactgcttctaaatctgcaagagaatcagaggttaacataatatcatcaacgtaatggaacaagtggactccctttggacattttcaggctgttaaatccatggcaacaagaccatgacatatggtggagctatgcacatagccctgcagcaacactgtgaaagtccattgtcatcaaggcaaactgttcctggctctctagagcaaggtcaactgagaagaatgcattggccaagtccaccacatagtggtactgtcctaattccattgtcgagtggttcatcaaatccatgatagatggcacagcttccaagccatgtaaaatatccacctccagaatgtattcaggtatgggagagacatacacagtgtataagcaaggagccaagtggccaatgccaaggtacagagatacaggtttcactttcactgactggcctccgtaacctttaatatatgcagatttgcccaaaaacttaactgggttcccataaacaaggctacaatctatgccagtatctaccagcaccagcacccactgtacattggtgggggaccagtggattgccaattccacatgtggcctctggtcatctggtgtccccccaagccagacacctttggccagttccctagttgaacagaaaaggctctacatttccacctggctgcagcaagtagtctctgagctgggtaggaccaggtcacacagcaatgcctttctcccctttgggcattttccggaattgctgccctgcatacaactgtctccgcaaagttaggagtatttcattgggctgcttatcaattttctctcagtcaaccccagccaaaatcaaatctatccacatctgtgagcgtgtcactcgttggggccccctttttttatgggggagccccctgtgggtggggtaacttccccttctttatggtgtggaccctccaatccccctgaaggccttctgcttccctgagagccgccatggcagtggttacttcatgtatgcggtgccctacgtatggggtgaggacagcagctagggagccaaaggggctcaggagcatcaaacccaacatgagatccctcatgtgggaggtgaaacatttatcatctggccctcaggtattcaggacaaacatagcctgccgcatacccatctcccgaatgacttacaccaaattggcatatgactgccatttactcacagttttgggcatttcaccagcattattccacacagttcatatggctgcctgtagccactcagtcagggtgtggtctccttgcgctgccactaaccacctgctcacttgcagccgctgacagagagaggggtgagtcatggtggaggccagcttgtccatctcagaggtggaatgggagataccatctgctcccttgttccacagacgaagcatccaggcaggcaggggttcccctggacactggcaacactgcttgcctaattcctgcaactcagttggggtacaggcaatatacgaaatgtgttgcattatggtggggagtccctgagtccacccttggagccccagtggctgttcatgatctaccttctgtcagaccaccgggtgagcccgcaacaggggttcttcctccttggtatgaaactgagtggggatctccagacaagatgatggacccaggcctgcattcatggtagcctctaattccttttccaagctctgaagccacacctccaggcatcctgcctgcacctggaggtccccattcatggcagcctctaattattttccagatcggtgtagccagacctccagtctgcatccctcagggactgggtgtgtacttttcttagcacagttaaaaatgcccatccaactctgccagcaaaggctctctccttcttggtgctctgcacttccagctgcttcagcgccttctccatgctcatgggggacccatctactgccacccaggtttccactcaagcccaccctcacagcacggctaccaccgggtaccacaacccatgttgtggtcacatggccaacctggaatcagcagggaccgaaggctcacttaccttaggatcctgttcgtgatgccaattgtcaggttctagcccaaactaaagtccaaggggagttggtgggtgggtggcaggtaactggaaaaacactcgagtaggcggtttcgacatggctttattctctctctgggtgcaagccatatgtagtgtcagcagggtaattttaccttttacagacaatagtggctttgagccaagcacgtgctcatatgagtggtcacctaatgcacctcacatggcatggttacataatgtgtggagttgtgtgcctgcctccaaacccactgagtcatgctgcaccagaaggctgcctcggcctactcctgactaaagcacaaccatctcccttagagtgggctaaatctactgctatttatactattagaaattttaacacagaagttttaaatatttacattgttaattgattttgaaataataagcccattacaggttaacataattaacatacttttattaaaaatatctgtattttttaaaagaaaaaaaattagcaacaacagtgatccttggaatcgtcccacctcagcctcccaagtagctgagaccacaggcgcacatcaccatgcgagctaatttctatattttttggtagagatgggatcttgccatgctggccagggtggtctcgagctcctaagctcaagtgatcctcctgcctcggtctcccaaagtgctgagattacaggtgtgagccaccacttctggccagaagctggattctctgtcttgttctccatccaatctgttagactgtcaaatgccaaataacctttggaaaattctactcgtaaaataaggagagagataaataacttctgagtatcatcattaaaatagtttgacctcatggacccactgggtcccatgtggagaatagctctaagctaaagagtagaatggctgggaggggacataaacattcagcccatagctgctgaccacaataacacattttaagtctcttcctctcctgctccttgtgattgcagacagactcaatctgtaggagagctgtagagagaacaagctcaagcccctgattttgcctacaaagaaagctgagcccagcaaagttaagggacttacccaaggtcacacagccacacagcagagctggggctgagctccaggtgtcctgctacagaggccacttctttctcccactagggactggcctgtgattacttcagaaaacaatggtcagctaactgattctgaacgccctttgctggtaaaagctaatctcctgaggaaaaatgtatgcattggctgggcgcagtggctcaagcctataattccagcattttgggaggtggagacaggtggatcacttgaggtcaggagtttaagaccagcctggcagtcatggtgaaaccccgtctctactaaaactacaaatattaagctcggcatggtggcaggcacctgtaatcccagctactggagagactgaggcaggagaatcgcttgaacccaggaggcggaggttgcagtgagccgaggtcgcaccactgcattccatcctgggcaacagagtgagattctgtctcaaaaaataataatagtaaaataaaaataaataaacaaataagtatgcatcacctcaggtggtcagtcagctttcccaagaccccaaagcacacaatgttctttctggtatgagtgacatggggttcacagcaccacaaagtccatgacttttccctcagaagtgaatgcatggctaattattttgtattttttgtagacatggagttttgccatgttgcccacgctgctctcaaattcctggactcaagtaatccacccacctcagcttcccaaggtgctgggattacaggcatgagacaccgcatggcctgcacctatagtcccagctatcaggaggctgaggtgggaggatcacctgaaccggggaagttgaacctgcagtgaactgtgatcgctccggtgcactccatcctgggcaacagagtgagatcctgcctcaaaaaaaaaaaaaaagtgaacacacatgctggggaagaggcctgcaggcacccctgccagttctgcaccagagcacactgtagcagccctgctgtgatgcaggaagcagctccaggtcctgcagtctgaagcatggagcctgaagcctggagccccccatccaatgctgcgccatgctcaccagtatcccccagcatcagcaccgaggcaccagctgcagataaatttctcacctaaaatgttgagagatgttgctaaactgtccttctaagggtatgtataataatacggtcctgccgatactgaataagactatctgtttcattacatcctcacaatactgaatatcattagcaacttgaattttaaattgtgctaatcaatgaaaatgattgcctaattactagtgagttgaggttatttaacattaatactccttctgatgaaatattttgcatttatcacattttacataaattctctctatataattagcactagaatgtccgacttggttttcattgttcctcacctgtttggaaacacattaagaatgagggagagaatggatggggactcacctagggatgcatggagctggtcggcagccactctgaggccctcttaacacttccccaccacacacttaatttcccctggtttgtccatagatacatccaacaatttttatgtaaataagaaagactcagctttcaatggaaaatggtaggttggattttatgactgaagtggcaaaaagaaataagggattttattatgggggaggtccaaaccctggtgaaaaacgaaattcattgaaattgtttgaaaattcaaggattaaatcagattattttggattcagtaggaattagattactttaaagccccaggatactttattctgtagaatgcatggaaagtatagaaaagagaaacaaagagggaaagtcatggctaataacctggaaggggtaaatagggagccaaaggcctgtgggacgtaaccaactcagcattccactggaggctttatgatcaaatagcaagctatttatcatgaatgcaggatgtgggcaaactcacgactgctcccactgccagaaggtttgctgagggcaatcacttcctggcaccgagctccttgaggttatctactgggacatctggagaatgcagtcttgcaagcctactctggacccagcagctgaccccttcttccatgcccctcttcctgctatctcttttgcctaataaatatggagggctgtgtaaagctcagggcccttgtccactagaggcaaactgcccgctgaccccttcttccaaatatgctcttttgtctcatgtcttttattcccgctttcaccccactttgttcagtccccctagggccgtgtgggttacatagtggcgccctgaacagcgacagaatcaggtgctctacaagtggcgtccgaacacagggactatgaggatgtgaatgaagaagatctgctggagcagaggaattgaaattgacaaggtgaatggggatcccgggacaagtctgccggcagcagatataaggtcagtgccctaaagaggtactgggagcagtgccttaaagtagtactgggaatgggaagttttctgaatcagggtaacatggggcagaattggtctgttgaagaaaaacattatgtgcagttgcttaaagttttgttgaaacaaactggtgctcaggttagttctcacattaactacgatgctacaggaagtcattatgcataacccatggtttccacaggcagggactcttgatgtagaaaattgggatagagcagaaggattaaaacaggctcatcaaaaaggttttcaagttgattcttcagttttctccacttggagtttagttcgtactgtacttctgccattatctccttgttattctgcgggacagcaggctgaatgtaaaaatctgaaagaatctgttgtcccacccacagctccagttgaaaataagtaataggagagggaggataaaaattggcctataccgccccctccagttgcagaaacatctgtaccgcctccttcggtggcagaaacagagaccccaatacaaagaattttacgctctgccgccacggctggagagcccttaggaccttgcacttttcctatttccgtaagtcctgatccaaataatccacagcagcttaatcatgaacacattccactagagtttaagttgttaaaggaattaaaagtgagtgtggtaaataatggcatacagagcccattcactttaggattgctagaatctatgtttggtgctatgtgtcttttaccctttgatgtgaaacacttggcatgaacttgcttgtctgctagcgcatatctgacatggaatttaaactggcaagaacagggtgcagaccaggctagacagaaccatgctgctggaaatggagacattacagaggataggctattgggtaatggcccttattctgacctggtacatcaactagcactcacaaatgctgcttatcagcagtgcacacaggctgctaaatgtgcctgggccataattcctgaagagggagtcccagtactatcatttttacatatcatgcaagggtcacaggaaccctacgcacaatttcttgcaagattacaagaggcagtgaggcatcagattcctcataccttggctgcagaaatgctaacctttactctagcttttgagaatgcaaatgcagattgtaaatgtgcactggcaccggttaggtgtacaaaaacttgggaaattttctcagagcttgttaagatgtagcaactgagctttatcgatctgcaatgttagctgaagcaatggctaatttagctgttgacaaatctaaaaagagccaagggtcaaaccctaaaatgggaaaatgttataattgtggaaaaactggacattttaaaaaggaacgccaccagatctcaggacagaaaggatcttacaatgcttttccccccggcccccagcggaaagaacacctggactttgtcctcgctatgacaaaggaaataactcggctaatcagtgctgctcaaaatttcatcagaatggcacccccctgttgggaaatgagatgggggcctgtacccgggcctcacaaacaatgagggcattcccaattcagacctcaaccctgtttcaggcatgggttcccagaggcatattgagtccctcacccgaggaactccaggaagtgcaggattagatctcccagccagagaaagggttacataaggtggggaagacaaacccaccaagattctcactggcatttggggacctttaccagcaggatatatgggactaattttaggcaaaagccaccttaacttgcaaaggcattactgtagtcccagaagttgttgactctgattatgaaggagaaattcaagtagttttattgtcacgagatcttcgggtttttgaaccgagagaatacataatgcaattattacttattccctgcaaattacacccttctccatgaaaggagaaacaaggaaataaagggtttgggagcacagctacacgggaaatctatctatcccgacccatagcctctaatagacccacctgtgtagtacaaattaaaggaaagaaattttatgggtttatggataccggagctgatgtgtcagtgttaccagcaggtctttgttcttagagctcccaagatggcggcaagccttttgttctctgacctggagttcttggcctcacagattccaaggaatggatccttgggccatgcagtgagtgtcatagctctattagaagctcttccaaaagtcgtgctgctatctatggactaaaacatactcaaacaataatgacctctggcgtttaggctcaatgctcagagctaattgcagtcattcaggttttacagctcacagcttcagatcctgtcaacattgtctgtgttcagtttatgtcgtaaatgtagccggtcacatagaaactgctacaattaaaagtacgctaaacccagaactgctaatttatttttaagacttcaacaagttatttgttctagtgcagctccttttcatatttctcatattccttctcacacacaacttcctgggccgctatctctaagtaatgagaaaacagacaaactgattgcctctgtgtttcagcaagctcaaccatctcatgtgcttctgcaccaaaatacttccgcccttactcacatgttcctacaggtttgtattatattatgcagtatatccctcgagccacacctatagaaggatgtaatccacgaggtttggctccaaatgaaatctggcaaatggatgttacacacacagcaacctttgataagctgagctatgttcatgtgactatagacacttattctcatatgctgcctgctacatgccaaacaggtgagacagctggtcatgtacagcgacactgtctgtcatcatttgctcatatggggatatctaaacaattaaaaactgacaatggacccgcttatactagtcatgcttttaaaaatttcttgcagctttgggctataacccataaaacaggaattccttataatcctagaggacaaggcattatagagcaggcacatcaaacattacaatgcatgttgaaaagacaaaaagcgggtataggaggccaactaccacctcaataaaaactacatttagccttatttactttaaattttttgactcctggtatggatggtaagactccagcagaaagacattggcaagtgttagaagaaaagaggaaaatttatccaaaagtgttatggaaatccctggaagaaggaaaatggaaaggtctggtggatttactgacgtggggaagagagtatgcttgtgtttttacaggagatggacaagccgtgtgggtgccctcaaggtgtgtgcaaccatggaacgggagactagaggaacccagggtggccaaccatggacagggtccccccggtacgagccatgagccagctgagcctgagtgcaaagacggagagaaggccaactggagtcacaacacagttctaatgttatatttgtaaagaatatcactactcaacttacagtttgtgtttatagatatagatatagatatagatatagatatggatatagatatagatatagttatagatatagatagatatacactttaagttctagggtacatgtgcacaacttgcaggtttgttacataggtatacatgtgccatgttggtttgctgcacccatcaactcatcatttacattaggtatttctcctaatgctctccctcccccagcaccgcctcccaacaggccctggtatgtgatgttccctgccctgtgtccaagtgttctcattgttcaatttccacctatgaatgagaacatgcagtgttttattttctgttcctgtattagtttgctgagaatgatggtttccagcttcatccatgtccctgcaaaggacatgaactcatccttttttatggctgcatagtattccatggtgtatccttatgtctttttgacagctaagaaggaccagctccaggtaaacaatacccaattgacctgtaaatcttaccaattatatcactgcattaatcatagcacattgcaaacacataatatctctactttgatgattttaggccacatccctgggctatgtattcctgttaatctgtccgaggcttgggctgccacacctgctttgcattttgtgaaacttcttctaactgagcttactcatcatgtctgtagagccttagacataataattttagctattgtttccttggtcgcactaataacttctgttgtgatgtcctctgtagctttgcataattctattcaaacagctcagtacatggagaactggacacacacagccgaccaagcatggctacttcagaataaaattaacactgagttacaaactgaagtggtgttatgggaagtcagggaccccaaagagagggaccagctggagccacagcagaggaacgtaaattgtgaagatttcatcttaatacggatatttatcagttctcaaataatacttttacaatttcttatgcctgtctttaatctcttaatcctgttaccttcgtaagctgaggatgtgcatcacctcaggaccactgttataattgtgttaactgtacaaattgattgtaaaacgtgtgtttgaacaatatgaaatcagtgcaccttgaaaaagaacagaataacggtgatttttatggaacaagggaagacaaccataaggtctgactgcctgcagggtcgggcaaaaagagccatatttttctttttgcagagagcctataaatgaatgtgcaagtaggaaacatatcgctaaattcttttcctagcaaggaatattaatattaataccctcggaaaagaatgcattcctgaggggaggtctataaatggccgctctgggaatgtctgtcttgtgcagttgagataaggactgagatacgccctggtctcctgcagaaccctcaggcttactagagtggggaaaaactctgctgtagtaaatttttggtcagaccagttttctgctctcaaaccctgttttctgttaagatgtttatcaagacaatacgtgcaccactgaacatagacccttatcaggagtttatgatttttctcctgtcctgtttcctcaggagcatgtgatctttgttctcctttttgccctttgaagcatgtgatctttgtgacctactccctgttcttacaccccctccccttttgaaatccttaataaaaacctgctggttttgcggctcaggtgggcatcacggtcctaccaatatgtgatgtcacccctggaggcccagctgtaaaattcttctctttgtactctttctctttatttctcagccagccgacacttatggaaaatagaacgaacctacgtgaaatattgggggtgggttcccccgatatgtgatgtcacccctggtggcccagctgtaaaattcctctctttgtactgtctctctttatttctcagctggccaacacttatggaaaatagaaggaacctatgttgaaatactgagggtgggttctcccaataaagtggtaatgttgaaatccacagttctatggttaggggaaaagcacaaagcttgcaattgcagcagcaattgcattgtcattttaatcacactcatatttgtgtaaccaacttagaatataaccaaagtgagtatctgtgggacgttgtgaaagcccatttgcagggagctttcacatctaacatcacctttgatattggtgaattacaaaacaaaattcttgatttacataggcaaattcaagagtttctgccttctttagaagactggaccaaattccagcaaggcctggagagcctcaatccttggacttatctaaggcactacattaacatcttacatgtagttcttggaataatattgttttgtctctgtcttctgttcatagcctgtaaaattggatggaccaccaatcggaaaatgagagctgcccaccctggccttacattctttcaattaattcataaacagaaagggggatatttagggagcctaaggctcgtgggactgaccaactcatcattccactggaggctatatgataaaacagcaaactgtttatcatgaatgcaggatgtgggcaaactcacgactgctcccactgccagaaggtttgctgagggcaatcacttcctggcaccaggctccttgaggttatctactgggacatctggagaatgcagtcttgcaagcctactgtggactgagcagctgatcccttcttccacgccccccttctcactatctcttttgtctaatcactacggagggttgtgtaaagctcagggcccttgtccactagaggcaaagtgccccctgaccgcttcttccaaatatactcttttgtctcttgtcttttattcccacgtttgccccctttgttcagtttccctaggtccatgtgggttacatagtggcaacctgaacaatgacagaatcaggtgctctacagaaataactttttaaggaaagatttgggacttagagaccccaggagacatacacaaaaatgataagaggatgtgcccaaaccagtcttaaagttgtggcacagggtgaggaagatgaagctgttactgaacctcagagagtgactggtgttacagcaaaagttagcaatggcctgaagggagggtttctgaaatcaaatatgaatgattccccctcagggaacccaaccttgggaactactgcatggttctctgtatgggaaaatatcattaatgcaggataaattgtgaaatatcacaggaagcatcctgcatctagtcaatcttctgtttctggggtggcctgtgcagctgtgcaggcagaggcccaaccatcctggtgagtggcacacagggactgagatccagccacacctaccaggccatgctctgggaagggggtgggacctgggcaaaggacacctctctaggactgcacagaagcctttgtgggtgggtgggacattcctgtgatggccttctggctgggcactatgaaatgctctgaagatttttccttgcactgttgcactaaccccagtcctctatcactgccccttcctcctgggcgacttcactgatgttgtggccatgtgaattctctggccaatgaaatgataaagatgatatggcctctgccaagcagacactgtaagtattattgtatgatgcttttgtctctttttttaaagttaaagcagtttattaagaaaataaaggaataaaagaatagcactccataggcagagcagctgcctctgtctcttatattttcccctctgcctcaagcccaacatgcccaaaattggggctgctggttcagcctgggtctcagaataaagacatgagccacagatccattgctgacccatgatggagatggacacaagagagaaacacatttttgtcatgttagccactaagattttgatttggaggccatttgctacagcaatataacctagcgtgaacagagagacacagcgatgttccatttcttttcaacctggaacaggagaatttcataggtgggcctcaatttcactttagtatcttatttagacaagaaagttcatactgttcaaatgtcatgtttaagagtgctggcattatcactgctgtggctaccccatcagatgttgctcactgactaatcttctcatgttagtgaggatggacaacatatcaggccataattcaaagtagcaaataggaaaagagcttcatcctagcattatgggaccttaattaatgtcctttcctgacaggtttcagaggcttttgcaggcagcagcagagctattcatctcactgacagtggggaacatggccaaatggttgcccccacaatggaggcagagtttcaggacacttgtctgatctctgcccttgaaggaacagtctcaccctgattgacacttttgcctgttatgtccaaagaaccaatggaaaagcaggaaaattattccttcttcatttctctcttcattatttaaaattattctgtcttcacttctctctccttttctctgcttcctacttagctctttagaaatgcaattataatcttttatctccccttcaccagacactcccaacagggcaagttcatctaactatgtgctcttagttagacgctacagagcagaactctctcccaccaagagactaccttgagacataacagtcaattcacaagccaaaatatgcccgctatgaaactctcccatctggaaattttttggctgcttttacaacctagttttgcccacaaaggcaccagcagtaaccaactcaactgcctggtagacaaggcaccaaagccagtacccagaccctctacctgctcacttcctgccttgcatgccacgccccccatttaaaagcctctgctttctgctccaaaggtgaagcagttacccttaaggaaagaagcctgtacttcttcccctaaggtagctttggaataaaagtcactttataccaaacctagctcttgttaattagactctgcaagtgatgagcaactgaacctacatttcagttataattcctatgcttgttcttcctgccctgccttggggacacgcacacactcccaggcacatacatgcacgtgcactgagacagctatgtgaataaccaacaagatccccttaggaaaaccggtgcttggcctggccttaaattccagacccttgggcatcatacccaagactgcaagaaagaggaggggctggacctgaaaaacttggaagggaaggtccaactgtacaggtattttgtcaggcatgtgatttcagtataaaattctagaaaagatgagtgacactttataaggagagaatatcaacaaaatttctcattttacttcttgctaagacgacagcagggaattgtaagcagatggatgggcaatccccaccttcagcaggggaggccaaggccccaacacacctggggagaagagctgggggcagtgaatggctgaggctttcttggggagctgggccatcttcttcggttttacttcctgaggaattcacaggcttccaggagggctgtgggacacaacagagcaagagattcagaaactgatttcttccattaaaccagttatttaatccaataaatcaaagagaatactaagagttttctctgcccttctcccatcactgagtcagtgcttgccacactcatattcccactcccctactcctagcgactacggtgttcaagggagccagagtctagccctcaccagccagggtgtttccctgctctggcctgagagacacaaccaccctgcacttgtctctgattgaatcgactgtcacattctcaagttcacaagacattggtggtcctctagcttctcccggaatgtgaacctgtttgcaatcatgttcacctgcagattcactcattcattcacagatccttactgagcacctgctttgtgtgagttgctgtgctaagtgctggggacacagcatggatagactggcctgccctcaagaagcatgtggtctatgcagtcctgagctggctgctcacaagaagagccctgtagccatatttctcagagggtggtcctgacctgcatcacagtgacctgagttgtttgtcaatacagaaaagggtttctcaaccttggcactattgacatttggggcctgataataaccctttattgcagggggctggctgtgctttgtttagtagcatccctggcctctacctatttgttaccagcagcaccctctatgttgtaagaatcaaaaaaatgcttctcacattgtcaaatatcccctcaggggaaaaattgtctctcattgaaaactaccgataaagacatttctggccctgcccccatccttggaccaacagcatccctaatgcccccaactctgggtgagggaccaggaataggaatctgaatgattgcagtgcacagggagctgtgcacactgaaatcccacagttatcaccgggagccttacaatactctgtgatgtcttctaaatatttttaagggattaaattaatatcaacatatttccctggttaagatgtgttttcctacacttgaatttttttgagattttgttttctctatagttggcatctatggtaactgtctagaatcagatttttttttttttttttttgaggaagggtctttcggtgtcacctaggctgtagtgcagtggtacaatcatagctcactgcagcttcaaccttctgggatcaagcaatcctcctatttcagcctctcaagtagctgggactagaggtgcttgacaccacaccaggctaatttttaaaattatttttgtagaacaaggtctctctgtgttggccacattggtctcaaactcccgggctcaagccatcctcccacctctgcttcccaaggtggtgggatgacaggtgtgagccatcacacctggctggttttgtcatttctcaatgcatatgtatatatgcacctttcattttactgaataaaatggattatcagtttccaaagatttcatgacagtgccgtcactatccgtactataaaatttataaaaatttattacatactgctctattttattctctaattattttatcaatgagattataatttcctgaactgtaaagagatattatctttccttaacatttttacacctgtgttcgttcctagaatgctgtttggccctcaaaccttgaccttcacccatggtggtttctcggggatgctagctagggtctacttacgggaggttgagcactttttcagattagtaatgcctgcgacatactgtggtcccaaatatttttcatatgttgttttgccatggagtctggccagacactcagtgttgtcattgaacagaaggtttttggtttcagactggaataagcaaaacttgtccgggcagtcagatccatttctcccaaatttagcctgcgacaaaagggcagacagtgagtagctaaggaaaagaggaatttgtgggttaaaggaggcaaaggggtatttcttccacccaagaacagccctgagaaaaccatggggcagaaggagctgagttctggagtcattccacctccttagtggagtcccccaccccacactcctggtggcaggcccgccttgggcagcatccaggcctcacaccacttctggtcctacctcctaccatctgccatctttccttccttcttaacctgtgaccttttcccatacaacttcttatgggtgacaaggcaacaatggaggggttttgagatctgccctcacaagtcaattgctcaggacattctaatatgcagctcttctagagaggcaggctgctaggaaaacccaggctcagccactaaccagctcagtgtgcaggtcggtcaccctgcctccctcacacagttcctgctctgtcccaggctcccatgtggggagactgagacccaaacccctcagtcacggcagctctctcaccagcaccactgtgtgtgcacattaagagctccataaaggccagttatggtggccagtcttgttattcctgagttgttttcttcaaaagcacacagagacatgatgttatatgataaaaatagaagttctaataaaatcccagattttaagaaaattttgggatttcgttcaaatcacatttagagagccctaaatctatagggcaccttctgagtttgctgttttagaggcctggtctagagcactgttcactcggcccaggttcaggaaatgtcacctgagtaaaaagcactatactaatgcatgtgggaggaaggctcagtggcttcctcatttgccagaagaacagcaggagggaaaaagacagcctctgagccaggcagtgatggcaacaaggccagggcacagagtctcagcagaaatggagtgagtcccagaaagcccagagtcaaaagcctctgttgttcttgttgacactctgggcaacgccacagcatgaagccaatactctcaccatgagcttcaagtagaggactagagaggatcgagtgggctggtgcacctagctctgtgatctcctcacctaacatgagcccacacagctaagaaagcactagaagccctgtggtccatacctgttggtggagcaacacctgtttcaggcgttccaccttatccatccgagacaccacggcatgattcggggccatggcaagatggcagcttctagcctcagtcacaggcttccgtttgccatcgaggcacagcagcgcaaagtctgccagcttcaaatccttagcccatgcgtcattgttatttcctggggagaaaaagaaggtggcatcatccacgcctcccctgcttagccaagaagtctcttctgggtgggtgtggccattccactgacctcccaaatgcacacactggggttgtggtgatgtgaggaacagagaaggagcttcatcctacacaagctgtacaaacttcaaatataccaaatattagtgctgtgtccatgcaatggaatgttattcagcaataaaagggagtgaagttctggtacatcctgcaatatgcatgaacctcgaaaacgatgctaagtgaaagaagccagtcacaaaagaccacacaataggctgggcacggtggctcatgcctgtaatcccagccctttggaggccaaggtgggagaatcacttgaagctaggagttcatgaccagcttgggcaacatagcaagacctcatctcaaaaaaaaaaacccaccacatattatatgactccatttatatgaaatgtccagaataggccagcctatggagacagaaagtggattgatggttgccaatgctgaagaaggatagggcaatgactgataataggtgcaagggtttctttatgggaggatacaagcgttctagagttggattgtgttgatggctgcacaactctgtgaatgtgctggagatcactgaattgtacactttgcatgggtggattttttagtatatgaattctacctcaataaagctgtttagagttcttatttttttaaagaagaaaaccctccacctatgccatatttttcagtgagttccagaaaaagaatagatggtttacattcaaggagaaattggtttctcctccctttcatattcaaatgctattagtgtaaccagagaaaggaaaggaacttttataggtttatcaaatatatacagccaattctaacaaaatacagttgtaaagtaccggagaaagttaaaattaaatttgacatcaatctgatccctggagattacttcagttaatggcttgtaaattctaaatgtaattgtatgcatgtctatgtttgtgcagatgccggctcattgttccggctcccgtttgtctctctgctctctccctttaagaaagcactttattcattctcttggattcctctatttgatattgaaataatttcaaatttacatgtcttgttttaatctctgtcccaagagacactagaaggagcagaagcagaagggagaagtggctgagactgcagtgattactgaaggagggaggccgaaagtggagacagttctttctcaggaaacagaatagcaagtcacctgctgagacttgggggttggaatgctgaagtggggctaaggagacagatgcagattggaaggtagcaaatggctgaggaccaggagagagagtgattgttcaaacattggctggaagattatcttccatcatctgcaaccacctgtaattttgttcccactaactcccaaggagtctccagaccaaggctcacatggggatgaatgaaggcctctacttcctttttcataaagggaggcttcatttgcatatgttcacccagtttgtagcatcatccacagtttccaataggcatgcatgatctcatgtgggcagacagtgtgtttctgtggttgactagaggaagccagggagacatttgctactgagcatggctagtatctgtgtgtgtgagagtgagtgtgtgtgtgtgtgtgtgagagaaagagagagagtgtgtgtgtatgaatttcgtttcaaaatccatatgacacctacagatgttatcatgttgtctattgagataaagaattttggagttcttttaatcacaaatatggaaaatgttataaaaccttcccaaaggcaaatctgaacactaagatgtgttgtgatgccaaagactctgctttgaaggagaaaaggaaacaccttcacctaccatcagtgttctgcaagacagtgacatctttcacaaatgcaacgtctccagcattctcagccaggcacctaaaatgttccagaaaatatacacataattacagaagagaaactagtggggctttcataaatatttgtaatatgcattccaaaaactgaaatatggaagtaaacatctaaaagacaactatttctaggaatttactgtttacagcggcagattgaacacaggtgtacctgccctccttttaaaaccctatataaaagacattacaaaaccaagaaatctaaagatatgcgacccaggaaacaggcaatctaacatgaagtaagacaaaggaaagcaccaaaataatggtcaacaggacccccaggaccacagatgtgcaggcggcctacacagcaaccagtccaaactgcagcaggaagatggatgccttctggagcagcacttccaagtaaatgatgaaactgtgatagcacccagagagagagagagagagagagagagagagagtgtgtgtgtgtgtgtgtgtgtgtgtgtgtgtgtgtgtgtgtgtgtgtgtatgcatgttgttaggagatttacattactggcagacagtttggggatgagatagtgatgtgtttttttaagtgcagaaaattaagcaaataagaaaagacatttatgaactccagagtaaacaaaaagtttgtacaataagggaaatataatatgagaataacgcttacacagtcataagtactgaatatgacattagcgtgttgggtgctgaagagagttgaagtctgtggttgtgtggtggaaaaggtgctgggggcagtgtgagaggctagatcttcttctatactacagagtcagcagaaagttaaaaattaagaaccagcattataaggatgatagaaataaaggggtatgacactggtttcagcttttaatgattttgctataaatttccccaatctagattctagatataatttaaacaaaagacaagggattttcttccagtataattaggaatattaaaatgtgggtgtttccagtgaactaataccttgctgcaggtctgaaaaaaaaaaaaagaggagcacatgcttctttcgggctcttatgagacatgtgttcagcatttctgagtagaatcacatttccatttgcaaatccttagtcccttaaagatatttttatacattcacaaaacatttttttttgttttgggtctttttttatgagccacttatatagcaaaagctacttttctgtcattccattactggaacaaggctgttgaatttatattaaaaagttcagacaccctcagacacatgacgccatctggtcgtgaaatgtactcttggcaaatggaggaaaaggaacaggggaagatcctctctgcacccttcacactggtaaatagtgcccctgagaagcaacacccggatgaatggtgctgtaaaacgtggggtgtggttacaagtcactaagtggttataacttatgaattctgaaaacttgttttttggcttatttttcacttcgttactggagaataacactgcaattctgccatctctttgccatttctaaggccaaagtcagagaaaaagggaaacctaagccatagtcatgacctaggtgagaagaaaaggggcggcgatgggaaagagaattcttccccataaatggaattgtaggaagcacttaggataccacactctacccatttgattttcaggacgaggctattgaggcctactgctgttgatcttggctcaaagccacagggagaagcactgcggagctgaggtcagacagccctggtgccagcctccactctctggggcggtgggtgtggtggggacagccctcactggggccacccatgagctgacccacaggatgacccccactctgctgtgacaggtcacatctggctccttagaactgcaatgctgacatgctgagggatgaggtaagtccccatcctgatggagctcagtcacagactcaccggaaagccccagtgtagccgtagtatctctcgttgctgttgggcacgcacttattctcaccctgctcgtcgccaatacacagagcacagagattagatctcgggtcagacccaggggcacagctttgactgaaatattcatctggagagaaggaacacggggagtcagctcttcaaacctgagtccacacaagcaacctttacctaacagccgatgcagggtggtttcagttcattagacttcccaggacagcaatctagatagaacacactcaccatcacaaagcaacatgttgtcaccaacataggacccaccagaaaagcttcattcagactgtaggcacagatggacacccaactaaggctggggatgagagctgtggctgcctggagggtcccgtcatcacagccttgagctggggactcagctcatgaccgtgatggctgtgtgcagcagagcctgtgagttgcctagtccaggatctgattttgtttttatcagtaatggaaaccctgctttgtatctgggtgcttggccctttggtataaagactagacttatcagactccctggggctcatatggccatatgggtagctataggccagtgaaatatcagcaggagtgttgggcgccagcttctcagaaacatccttgaaagacaattggtacatgccttttgccctttcttctccttctctttcttcatcctgcacatagaatgcagaagcagggactggacttagagatgcaatgtgggccatgaggtgaccttgagcatgaaagccacacaaatggcagagtagccaaatgattaaagcccaggttccagaccccatattgtcttcataccagccctaggcaaaccacctctggactacatgacacagaaattaacttctgtcttgtttaagcctctactatttcaggagttttctgttccttgcagctgaacctgatctgaattcgttcattgtgtgatttaacccaagaaagaataaacaaaggtgacaagaaagctctgccccactgagcaaacgtcacccattatcagactcccactgctgctggaagagccacactatgtgtcaacctcaggaaaagctgggagttcccattccatcctggcagtttccctacagctcagaggctgccatggagctggtgaggagcagagccacgtgaaagctgcctgccccggccaggatcaaaaacccatgcagtggagcccctgccctaggagacgcccatacaagaagggagtcacattgaggatgtgctacacaccatgccacggggcccacagcaggcagggtgtggctgatgctgactaggatgagtgtggggtgtggtggggagagaaaactgcagaagcaggtggagccaggctcttgaggtcttattcaggctccgttgcagtgtagagtaagcgtcagttttgcttagtaacaggagtcacctttcatgaggcaggcagacatctttccccaagctgggaagccagagtttaagaggaatttaggtctggagctccaagaggtaaaaagcatttgcacatcttggaacttgcatttattcttagggtgcagcgaaataggcagatattccaatctttaatcttggggtggggtgaatggggcatgggaagtgctgtgcagggaaacccccagtgcacccacgcctccagggggcagccacagggagaatttccttatgctggaagaggcctgcaggccactatcagcctgcaaatcccctcccctcccttccctaaggttccacagcacaatatgcctaccctccagggtggcccacccaccgcacctttggaactccttaccaaatttgcaggagcccgtctggttgaagagcaggcccatggggatattccagcctgcagtcctgtccacggcggtgtggcaggacttcttgcctttcacagagttccaggtaaggctagtgtctgatctcctaaccaccgccacagcaagatatcctggcataacagatgacagaaaaacaagtcttaacctccaggaggcctggcacatggattccagtggagctgtctacagcccaggccaaaacaggccaagaagcaacaccaggcaatgattccctcaaagaactggcctttttaggtagaccgagaaagcataagctgctgccttatgttaaggtgagattgatgaaataaaacagtaagaaaagctgattattttagtgattacaggggactgtcttcaaccagccacacaatgtccctgagttacaaaccagcaatgcatctctcagtgtaagcttctacagcaacaaacactataaacaacaagagagaccccaacagtgcataaatcaccaaccacagtgtgcatcaggcaagagcaccaacatccagccagctaacggctgtgtgggtacaggggcacatgtccccagggactgccctgagctgagtctgaacccaccctgcactggttgaactcaacatggttgccgttgtcctcctgagagaatgcatctgacagacacccaccaagggcaagtcttttctgaaactgagcaagcaccagctctggtgggcaggaggagtggtgcacagagcactgggacacgagtcccaggtcacgaggacccggggtcaagaccaggatctaccacagtattacctatggctgtgagtgagatcctgggcacttggggactctcggtgccactgtttcctcatccccatgaggtggggaagtagcaccccccattccatgaccatgacaaaatgagggactatatggatgttctttgccaagtgtgaaggtcaatataaacattaattagaactattcctctgtgaattatttgcacccttaaaattattgctcctagaagccctatagcttctagggctgcaattctttctgttttttttacagttcctgccacttcctcttccagcaacaagaacttatccttgaccctgaaagtggctaatgccaactcaccttccacaggtctatccacacagttaggatcagggtcactgctttgttgggattctgaaagaataaagacaagccagacatcattatccattcagatgtagtgagaagccacaaactcttaaatctcaatgatgcagaatcaaatccaaagagaccgtcccagcagttccatgcaggagaaatgcgtctatatgttcaacaaaagacatggcacagagattcacagctgcattattcaccacagccaccaactggaaactactcaaatgcccatccacactcaaatgatgaataatcacagtagactcacacagcgacgagactgaacagtctacaactacacacttaggtggatgaaaagcataacgatgagcaagagaaaccagacataaaaaaacacatgctgtgtaattcctttaacatgaagtttaaaacataggcaaacttagatctgcgaccttagaagccaggagagaggcttcccttgcaggagtaagggggcgggggacaggaggacataaggggcttctgaaacttgcagtgtttgttctgggcccgagagcatggactgtacagtgtgtgaagtgccatgagttgtacatttatgtgcacttttctgtttgtatgttataattcactgagatcttctggaaaattaagaagataaaaccaacctgtcccttgttaattctcaacacaataggctttgtgggtaacacggcccctttcatttcttctttccctgattctcccttttgaatgtatctgttcatcataatgtttcacctgcattcaccgaatgggattactcatagccccactcccatgacccagagggaatataccagaggatgctaactccacttactgtagttctctgccaggacaggcaccaaaccacatttgcctgcagtgtacacatatcctccatccaaactcatggcatcagcttctcctttctgcaaagacagagcagatctccagcaccacagtgaggctgcatcccgtcctgcctgtctatatagctctctgagagaatggttttctgtcaggtgaccagtgaaacagcagaaagagatggactattcaaactgagcagccagaggaaacaccgtgtgcaccactaattctctcccagccctgcctactttctgggctgtcaattcaactggaaagaccaggcacaggttgcactaatcctctgtcctctgagcaaaaccttttctgtgtccctggcactttggggacaccttcctggagcagtctcactgactgaggacacagatgggaacagctggcctcatctaatctgaactcattagcactccactccaagcgctacacagaagttgtccaacacataagctgaagtcgtcatattggcccaccaccagaatgaacaagtccaggctacaacacaggatcatggactcatcagtagtatgaaacttcctctttgacccagtaatatttttacaactatattaaaaatagagaagtggacaaagatttctactcaagaatgctcaccacagggttattgataatagcaaagtaagggacaaagaggaatgggggcatgactaaactgagccatattcacataaaagatatcctggaagcatgtttaaaaaatgttttcgtccgagtgctgtggctcacacccgtaatcccagcactttgggaggccgaagcaggaagattgcttgagcccaggagttcgagacgagcctgggcaacaaagcgagaccctgtcgctacaataataataataataattatgcaggtgtggtggcgtatgcctgtagccccagctacttgggaagctgagatgggaggatcacttgagcccaagagttccaggctgcagtgagatgtggtcgcaccactgcactccagcctgggtgacagatcaagaatctgtctcttaaaaaaaaaaaaattaatgctttccaagagtaaatattcatgtggaagaatgcccattatacgctgtttagtgaaaagggcttaaaaacgacatactgcaacacttcattattgttgcatgcatatctgcagatgtgcagagaaatactggaatggagaattagccagactttaaccatgtctgtccctctgtgtgagatcacaggtggtttggggggtttgttgttgttttgttttaacataatacctttccatattttccaaattccttataataatcctgagttgttcttataaccagaggagtgggaaacccacagtaaactgctttttgaaactaaaatgctttctggccctgagcacacctctccaggcatccctgcctcacccaggcccccgtggcctctttgactgttgacttcactttaagcagatgcccaggccctaggtcttccaccgggcccaccgcccgcccctgtgatggagctccctaccagcaccagggcgatgcagtcctctgtggtggaggccgaggagcaggtcacgctgccttcgctcaagccactccactggttacacttgcgcagctcctgctcgcccaccgcacaccacacgacccgcgcacgccgggcagccacttcctcctcacctgccagagggaagaccgcaggtggctgggcaacctgagctttgccaggttgtccaacctccccagagccagggtcctgcccagactctccctggaacaggagctacagtacatgtgtggacatgtggacccataccctctcctcctccacttctcagctccaagccccttcttcaggtccacagagctccctgtgtttcccacttctgttcctttggagaagttccctggcttctaatctatccattaatctttagagtcaggaggcgcctattgtctctgtctctgaggataaacgctccatgacccagagaccagtgacagtcccaagagatggcctaggggaccttgagcccaaccctgacttcccctaacgcctgcaatcaccaccaataactacggtgcagcctctgggttcccccagactcccacccccagccccccagtagagaaggagccatagctgagttcccccaccatggtgtccccaactaagttcaaggtctgggcctgggaagtgtgggtaaatccaggcccccggattcatccaggaggggtcctggctatctttgttcatgttcatgtttctcacttaataggaggcaaactgatttttctgccaggcctggggagcctgacgtgcactgatcaggtggccagactattcttttagagacacctgacctaatccacagaagacactcacacctgcatcaaacctccacgatgaccccacagtgtctgggaaaaggagtgaccgccacaaagtagggccacctgctgggaagtagaagaccacaccaggcggacctcaggaccctcctgggctcactcacttttcctcaagttctggatggcagtgaagtagccggagccaaggtacagcccagaatctatcctcgggggcaccctcgaaaacccaatggcagagtccttgaacagcagatctttctgcccactaggggagccaaagagctggaatttcggtgacttgtcctttccaaacttttcctaattaagaaaaaatagaattatggtgtcaatggtaaatagggaggaaacaaaaaaatgatgttaaaaaagagtatctggagctttgggatcattctaactgagagcaggagcctcggttgagaccctcctgcagagggacttgtgccatctcggagacccaagctcagctatggctcattctttgaagagttgctgaggtccaagcaccttagggccctgagaagattgcatcgaccaccccctgcttctgctcccatcataagacgctgtcagcccgtgtgacagaagagtttcattgcttctgctgtccacagtacagcctgggcaagcagcccaatgcattagtgtgctatcctgcagcaaagctacaggacttctggagtggcagaagtcagggaagtaagaaaccttgctccctgccccccatatccaagcaagtggggaggaccgtgggtgaagatacctgtgcctggcggagaagattccagatggcatcctccttgccattcacacttcgtgccacaacggcatgagaagggacccgggccagatggcagtctttgaacttgtccactggcttccgagtgttgtctgggcagagtaactcatactcgtccctttcagcctcgtctgacaggtcctctgcagggaaggtgaggtgggagggagtctagataagccgactccagcagtaacctcgagctatagttccccttctccctatagaattttgagcttggggagatagctgacaaaactgagggtcagaaaggcaggggtttgctccagaacactcagaaaggtaaaggtagtgccccaaaagcctcagggggcagccgaggtgtgatcctcatcctaaatcacttaggccaccctggggttcccgtgcagctgctgcctggcaggccagagaggccaaaccagacccgtctgtttctgcggcatctctgcctggaaaagtcactttgcagagacaagctcagggggccaccaagggttgctcccttactcacatctctgggaagaataaaaatgacaaaaatgttaacaaggcagggaataaggcaggaaggtgagacactttccaacactgagtatatcaaaagaaggggaagaatggttttatgaatgagttcaggcaaatgtggaatatcatatataagttgcttcagaatgtgtaaagtgaaaaaaatcttgcccgagtcattttatgagattagtacaaccttgatgtcaaaatcagaaaaagtataggagggaagaattaaaagtttattttacttacgaacataaatgcaaaatttgtaaataacgtactaactaactcaatctcacagagtatttaaaaagctaatagattggaatgaaggtttaccagtgtattccattaacaaaagaatggctgaacatcaaaaaaactaaagtaatctgcatttaatggcagaaaaccatgagatcgtcttcatcttaatagatgcagaacgattgtttatgtgttcaacatctatttgtgtgtggtttttttttcagcctcagaaaaatagtaatagatagaatcggtaaagtttttttgtttgttttgagacggagtctcactctgttgcccagcctggaatgcagtggtgcgatctcagctcactgcatcctccatctcctggagtcaagagattctcttgcctcagcctcccaagtagctgggaccacaagcgcacgccaccaggcccagctaatttttgtatttttaatagagatggggtttcaccatgttggccaggctggtctcgaactcctgacctcatgtgatccacccgcctcagtctcccaaagtgctgggattacaggggtgagacaccacgcctggccataagttattggcttgataaatgccattaatctacagcaaaaaccttactaaaagaagaaaatgtagacattcaccgcaaaatcaggaacaaggcaaggatgcccactgttacaatgccagcacaattctagatatccagatcacacaatttacaaaagaaatgtgagatataaacactggaaggaaaaagacacactcttatttaaaaagatgatatcgtcatctacaaaaaaccaatgaaaccaacagaaactaataaaactactcagaggagtaacaagttataagagcaacctacaaaaatcagatgttatcctcattaacaataaccaaatagaaaccaatatggactataagatgttacaatagcaactaaaaccattaagtagctaataattagcctcccacaaagacacatcagacccacaaaggaaaaattttagttctatcaaagaaactaaaaagaggtgtgatcaaatgggggagatttagcatcaccatggactggacaacttaatgttataaatatgctgatttttcatggaacaatttaaattcagtacaattcgaatcaaaattaaagtatgattttttccagaaattcaacaaaataattctgaagttttagctgagtatatttgaaaaggaataataaagtgagaggggagagggagctctctctcattctctctctcttcctctcactggctctctctctttctctccaccagatagtaagacccattggtaagccacagtaacaaaagcagaaaaaatgcaaatacaccaatgaaataaaatagctcagaaactggtccacttggatatatacaaacttggtgtagaattggcttcacatatggcagaaaaaatatactttttttattgtaaggtaaattgcctcactgtaaaggggataaaatgctaaagccaaatctatatctgactttctaggtagagcacatataaatagatgaggaaggggatcttcaaatcttattttaggaaataattatgatttgggtgtgaagaagggcatctttgaaatatctcaaaactacaaaccaacaaggtgaggcttgtggatttgaccttatcaatatcaaggatttttgatcaacagagactaccgttgtcagatttttgactgagaagaggttttactaaagtttaaaatcagcaatagtttgatacctagatagaaggaacttctgtccttgaatcaaaatcatgcagaaacaaggtgtgaaactcaatttaaaaagtagtcaaatgtcacaaaataagaaagggaagcccaaacggctagcaaatatgttgaaatgatcaaactcaccagctgtcagagaaatgaaaattaaaaataaaacgaactatctattgcattacaaccatcattcggacaaaaagtatgaaagtcaaaaatacttctaactgaagttgtggggaaattagaacacttgcagagtgtcattccagacagcagcttggtgatcctgggtgcatgtggggtctgtctctggtggccctgggtgcatgtggaggtctgtttctggtggcctctgatgaatgcggggtctgtctctgatggtcctaggtgaatgtgggtgttgtctctttctctggtggtcctgggtggatgtggggtgtgtctctgatggtcctgagtgaatgtgggtgtctgtcactttctctagtggccctgggtggaatatagtagccctgtctctattggtcttgcatgaaatgtagtgagcttatgtccactagtcctgggtgcagtgtgtttagcctctacatactcatcaactgctttattataagtccaggagggacgctgtccagcaggtaagtaaggaacacaggtgaaggtatcagtcgtgtggctgcatgtggtagaggaaaagagagcacaacctctgtccatcactatggtgacagagaagtaaaaggtggatgtattccacggaacactcctcaactgttaggacccctgagctagacatgtatacaacaataccgataaacctctaaaacaaaatgctgagcagaaaacccaagtagcaggatttctaatgctcactaaaacctctatgaacccagaaaccggaaacacaaaccagcacaatctgttctgcatgagcacatgtgtcttggaggactggaggacgcattgccaagcacctaggcatgggtgtctatgaggggaagagaaaggcagtaggcacaggaggtttgaagaaaactgatcatttaaaatatgaaagatcataaaatcagagctgtgccctgtaggaatcttgaaaatggtctgccatgaacttaggaatctaattagctcaaaggtcagagtcatgatcaagtaagataaaaggggtcagtacccacggctcattaccctgctcttaccaaacactgtgctctctctgataaaagccacgtctccagccccgtctctcagacacctgtgaaaagagaaaccatcaggggtaagcacaggcagccctccccagcccctccctgtggaacagtagccctggcactcagcatctatgggtttctactccctgcagggcagggctctgaagctt

SEQ ID NO: 6462 - DNA, 143 bp, Homo sapiens
aaatcacacacaagtattcataaccacagggttcaccagaaatctaaagcaaggagacactcactcatatagaaatggagttactcttccacagatcgttctggatcaaaggttttggaacagaaatgaattaatgatttttt

SEQ ID NO: 6463 - DNA, 620 bp, Homo sapiens; identical to SEQ ID NO: 3836
  misc_feature (1)..(620): n=a,t,g or c

SEQ ID NO: 6464 - DNA, 1151 bp, Homo sapiens
ctggtctagaatattccacatctgctctcactctgccatggactcctggaccttctgctgtgtgtccctttgcatcctggtagcgaagcatacagatgctggagttatccagtcaccccgccatgaggtgacagagatgggacaagaagtgactctgagatgtaaaccaatttcaggccacaactcccttttctggtacagacagaccatgatgcggggactggagttgctcatttactttaacaacaacgttccgatagatgattcagggatgcccgaggatcgattctcagctaagatgcctaatgcatcattctccactctgaagatccagccctcagaacccagggactcagctgtgtacttctgtgccagcagtttctcgacctgttcggctaactatggctacaccttcggttcggggaccaggttaaccgttgtagaggacctgaacaaggtgttcccacccgaggtcgctgtgtttgagccatcagaagcagagatctcccacacccaaaaggccacactggtgtgcctggccacaggcttcttccccgaccacgtggagctgagctggtgggtgaatgggaaggaggtgcacagtggggtcagcacagacccgcagcccctcaaggagcagcccgccctcaatgactccagatactgcctgagcagccgcctgagggtctcggccaccttctggcagaacccccgcaaccacttccgctgtcaagtccagttctacgggctctcggagaatgacgagtggacccaggatagggccaaacccgtcacccagatcgtcagcgccgaggcctggggtagagcagactgtggctttacctcggtgtcctaccagcaaggggtcctgtctgccaccatcctctatgagatcctgctagggaaggccaccctgtatgctgtgctggtcagcgcccttgtgttgatggccatggtcaagagaaaggatttctgaaggcagccctggaagtggagttaggagcttctaacccgtcatggttcaatacacattcttcttttgccagcgcttctgaagagctgctctcacctctctgcatcccaatagatatccccctatgtgcatgcacacctgcacactcacggctgaaatctccctaacccagggggac

SEQ ID NO: 6465 - DNA, 2532 bp, Homo sapiens; identical to SEQ ID NO: 296

SEQ ID NO: 6466 - DNA, 855 bp, Homo sapiens
gccctgagctgcaagattgcagactttggcctagcacgcctcattgaggacaacgagtacacagccagggagggggccaagtttcccattaagtggacagcgccagaagccattaactacgggacattcaccatcaagtcagatgtgtggtcttttgggatcctgctgacggaaattgtcacccacggccgcatcccttacccagggatgaccaacccggaggtgattcagaacctggagcgaggctaccgcatggtgcgccctgacaactgtccagaggagctgtaccaactcatgaggctgtgctggaaggagcgcccagaggaccggcccacctttgactacctgcgcagtgtgctggaggacttcttcacggccacagagggccagtaccagcctcagccttgagaggccttgagaggccctggggttctccccctttctctccagcctgacttggggagatggagttcttgtgccatagtcacatggcctatgcacatatggactctgcacatgaatcccacccacatgtgacacatatgcaccttgtgtctgtacacgtgtcctgtagttgcgtggactctgcacatgtcttgtgcatgtgtagcctgtgcatgtatgtcttggacactgtacaaggtacccctttctggctctcccatttcctgagaccacagagagaggggagaagcctgggattgacagaagcttctgcccacctacttttctttcctcagatcatccagaagttcctcaagggccaggactttatctaatacctctgtgtgctcctccttggtgcctggcctggcacacatcaggagttcaataaatgtctgttgatgactgccg

SEQ ID NO: 6467 - DNA, 2627 bp, Homo sapiens; identical to SEQ ID NO: 3112

SEQ ID NO: 6468 - DNA, 1125 bp, Homo sapiens
gtctcccccactgtcagcacctcttctgtgtggtgagtggaccgcttaccccactaggtgaagatgtcagcccaggagagctgcctcagcctcatcaagtacttcctcttcgttttcaacctcttcttcttcgtcctcggcagcctgatcttctgcttcggcatctggatcctcatcgacaagaccagcttcgtgtcctttgtgggcttggccttcgtgcctctgcagatctggtccaaagtcctggccatctcaggaatcttcaccatgggcatcgccctcctgggttgtgtgggggccctcaaggagctccgctgcctcctgggcctgtattttgggatgctgctgctcctgtttgccacacagatcaccctgggaatcctcatctccactcagcgggcccagctggagcgaagcttgcgggacgtcgtagagaaaaccatccaaaagtacggcaccaaccccgaggagaccgcggccgaggagagctgggactatgtgcagttccagctgcgctgctgcggctggcactacccgcaggactggttccaagtcctcatcctgagaggtaacgggtcggaggcgcaccgcgtgccctgctcctgctacaacttgtcggcgaccaacgactccacaatcctagataaggtgatcttgccccagctcagcaggcttggacacctggcgcggtccagacacagtgcagacatctgcgctgtccctgcagagagccacatctaccgcgagggctgcgcgcagggcctccagaagtggctgcacaacaaccttatttccatagtgggcatttgcctgggcgtcggcctactcgagctcgggttcatgacgctctcgatattcctgtgcagaaacctggaccacgtctacaaccggctcgctcgataccgttaggccccgccctccccaaagtcccgccccgcccccgtcacgtgcgctgggcacttccctgctgcctgtaaatatttgtttaatccccagttcgcctggagccctccgccttcacattcccctggggacccacgtggctgcgtgcccctgctgctgtcacctctcccacgggacctggggctttcgtccacagcttcctgtccccatctgtcggcctac

SEQ ID NO: 6469 - DNA, 1364 bp, Homo sapiens
aaaatcaggaacttgtgctggccctgcaatgtcaagggagggggctcacccagggctcctgtagctcagggggcaggcctgagccctgcacccgccccacgaccgtccagcccctgacgggcaccccatcctgaggggctctgcattggcccccaccgaggcaggggatctgaccgactcggagcccggctggatgttacaggcgtgcaaaatggaagggtttcccctcgtcccccctccatcagaagacctggtgccctatgacacggatctataccaacgccaaacgcacgagtattacccctatctcagcagtgatggggagagccatagcgaccattactgggacttccacccccaccacgtgcacagcgagttcgagagcttcgccgagaacaacttcacggagctccagagcgtgcagcccccgcagctgcagcagctctaccgccacatggagctggagcagatgcacgtcctcgatacccccatggtgccaccccatcccagtcttggccaccaggtctcctacctgccccggatgtgcctccagtacccatccctgtccccagcccagcccagctcagatgaggaggagggcgagcggcagagccccccactggaggtgtctgacggcgaggcggatggcctggagcccgggcctgggctcctgcctggggagacaggcagcaagaagaagatccgcctgtaccagttcctgttggacctgctccgcagcggcgacatgaaggacagcatctggtgggtggacaaggacaagggcaccttccagttctcgtccaagcacaaggaggcgctggcgcaccgctggggcatccagaagggcaaccgcaagaagatgacctaccagaagatggcgcgcgcgctgcgcaactacggcaagacgggcgaggtcaagaaggtgaagaagaagctcacctaccagttcagcggcgaagtgctgggccgcgggggcctggccgagcggcgccacccgccccactgagcccgcagcccccgccggccccgccaggcctccccgctggccatagcattaagccctcgcccggcccggacacagggaggacgctcccggggcccagaggcaggactgtggcgggccgggctccgtcacccgcccctccccccactccaggccccctccacatcccgcttcgcctccctccaggactccaccccggctcccgacgccagctgggcgtcagacccaccggcaaccttgcagaggacgacccggggtactgccttgggagtctcaagtccgtatgtaaatcagatctcccctctcacccctcccacccattaacctcctcccaaaaaacaagtaaagttattctcaatcc

SEQ ID NO: 6470 - DNA, 2325 bp, Homo sapiens
ttttttaaagtaagatgtttaagaaattaaacagtcttagggagagtttatgactgtattcaaaaagttttttaaattagcttgttatcccttcatgtgataactaatctcaaatactttttcgatacctcagagcattattttcataatgagctgtgttcacaatctttttaggttaactcgttttctctttgtcattaaggagaaacactttgatattctgatagagtggccttcattttagtatttttcaagaccacttttcaactactcactttaggataagttttaggtaaaatgtgcatcattatcctgaattatttcagttaagcatgttagttggtggcataagagaaaactcaatcagatagtgctgagacaggactgtggagacaccttagaaggacagattctgttccgaatcaccgatgcggcgtcagcaggactggcctagcggaggctctgggagggtggctgccaggcccggcctgggctttgggtctccccggactacccagagctgggatgcgtggcttctgctgccgggccgactggctgctcagccccagcccttgttaatggacttggaggaatgattccatgccaaagctttgcaaggctcgcagtgaccaggcgcccgacatgggagtgcatccgccccaacccttttccccctcgtctcctgtgagaattccccgtcggatacgagcagcgtggccgttggctgcctcgcacaggacttccttcccgactccatcactttctcctggaaatacaagaacaactctgacatcagcagcacccggggcttcccatcagtcctgagagggggcaagtacgcagccacctcacaggtgctgctgccttccaaggacgtcatgcagggcacagacgaacacgtggtgtgcaaagtccagcaccccaacggcaacaaagaaaagaacgtgcctcttccagtgattgccgagctgcctcccaaagtgagcgtcttcgtcccaccccgcgacggcttcttcggcaacccccgcaagtccaagctcatctgccaggccacgggtttcagtccccggcagattcaggtgtcctggctgcgcgaggggaagcaggtggggtctggcgtcaccacggaccaggtgcaggctgaggcaaaggagtctgggcccacgacctacaaggtgaccagcacactgaccatcaaagagagcgactggctcagccagagcatgttcacctgccgggtggatcacaggggcctgaccttccagcagaatgcgtcctccatgtgtgtccccgatcaagacacagccatccgggtcttcgccatccccccatcctttgccagcatcttcctcaccaagtccaccaagttgacctgcctggtcacagacctgaccacctatgacagcgtgaccatctcctggacccgccagaatggccaagctgtgaaaacccacaccaacatctccgagagccaccccaatgccactttcagcgccgtgggtgaggccagcatctgcgaggatgactggaattccggggagaggttcacgtgcaccgtgacccacacagacctgccctcgccactgaagcagaccatctcccggcccaaaggggtggccctgcacaggcccgatgtctacttgctgccaccagcccgggagcagctgaacttgcgggagtcggccaccatcacgtgcctggtgacgggcttctctcccgcggacgtcttcgtgcagtggatgcagagggggcagcccttgtccccggagaagtatgtgaccagcgccccaatgcctgagccccaggccccaggccggtacttcgcccacagcatcctgaccgtgtccgaagaggaatggaacacgggggagacctacacctgcgtggtggcccatgaggccctgcccaacagggtcaccgagaggaccgtggacaagtccaccgagggggaggtgagcgccgacgaggagggctttgagaacctgtgggccaccgcctccaccttcatcgtcctcttcctcctgagcctcttctacagtaccaccgtcaccttgttcaaggtgaaatgatcccaacagaagaacatcggagaccagagagaggaactcaaagggcgcagctccgggtctggggtcctgcctgcgtggcctgttggcacgtgtttctcttccccgcccggcctccagttgtgtgctctcacacaggcttccttctcgaccggcaggggctggctggcttgcaggcacgaggtgggctctaccccacactgctttgctgtgtatacgcttgttgccctgaaataaatatgcacattttatccatgaa

SEQ ID NO: 6471 - DNA, 556 bp, Homo sapiens
  misc_feature (1)..(556): n=a,t,g or c
cacgaggaggccaccctgggggcgtttctcatctgtgagctctgccagtgtatccagcacacggaagacatggagaacgagatcgacgagctgctgcaggagttcgaggagaagagtggccgcacctttctgcacaccgtctgcttctactgagcccagcgcccgcatggagccgcctctggagcttcctgttgttcatactttttccttcctgacatttgtttttacttacaggtgttctgctggtgacggtagcattacccaaataaactgtgcatatgaaatgggagaggagatgccaaaacgccagatgaaagcaatcaagtttcttcttttccacttttacttatgagcaggatattgattacaaagtttttcttctttaaccaaaaaggaaagacaacggtttgtgtgcacttcccgacatacctgtgtcttcgtgtgcctgccttccctccctcctccccaccgggccggactgtacagagccctgctgcggcgtgttaggaatgacctggaattgtcaataaacagatgctgctgtcaanaaaagaaa

SEQ ID NO: 6472 - DNA, 379 bp, Homo sapiens; identical to SEQ ID NO: 6020
  misc_feature (1)..(379): n=a,t,g or c

SEQ ID NO: 6473 - DNA, 462 bp, Homo sapiens; identical to SEQ ID NO: 3232
  misc_feature (1)..(462): n=a,t,g or c

SEQ ID NO: 6474 - DNA, 465 bp, Homo sapiens
  misc_feature (1)..(465): n=a,t,g or c
gatcatcaggggttgtcaaggcctgaacgtgatgggctgtgatcttgtcgaagtttcaccaccgtatgatctttctgggaacacagccctgctggcggctaacctgctgtttgagatgctatgtgctctccccaaagtgacaaccgtctgagtcttgtgctcttcaagacaaaacagattgcgtcgctgacaagttctcaagaagaacttatgagtaagcagtctgagaactaaagagtttatgccaagaaaactttctgctgaaagtgtcattgctggctgtgaagtcgggataatcagtagaattctcacccaaacagcaacatttcttaagggaacttnggatttaattgggggggaaaaaaaagggagtacntgtaactngctttgatttttttttcctttggatggaaagatgggagggttaaagggtaagtgagggagnatttcttttcaagttatcta

SEQ ID NO: 6475 - DNA, 3457 bp, Homo sapiens; identical to SEQ ID NO: 696
  misc_feature (1)..(3457): n=a,t,g or c

SEQ ID NO: 6476 - DNA, 1387 bp, Homo sapiens
  misc_feature (1)..(1387): n=a,t,g or c
gtgccacctgcccgcccgcccgctcgctcgctcgcccgccgcgccgcgctgccgaccgccagcatgctgccgagagtgggctgccccgcgctgccgctgccgccgccgccgctgctgccgctgctgccgctgctgctgctgctactgggcgcgagtggcggcggcggcggggcgcgcgcggaggtgctgttccgctgcccgccctgcacacccgagcgcctggccgcctgcgggcccccgccggttgcgccgcccgccgcggtggccgcagtggccggaggcgcccgcatgccatgcgcggagctcgtccgggagccgggctgcggctgctgctcggtgtgcgcccggctggagggcgaggcgtgcggcgtctacaccccgcgctgcggccaggggctgcgctgctatccccacccgggctccgagctgcccctgcaggcgctggtcatgggcgagggcacttgtgagaagcgccgggacgccgagtatggcgccagcccggagcaggttgcagacaatggcgatgaccactcagaaggaggcctggtggagaaccacgtggacagcaccatgaacatgttgggcgggggaggcagtgctggccggaagcccctcaagtcgggtatgaaggagctggccgtgttccgggagaaggtcactgagcagcaccggcagatgggcaagggtggcaagcatcaccttggcctggaggagcccaagaagctgcgaccaccccctgccaggactccctgccaacaggaactggaccaggtcctggagcggatctccaccatgcgccttccggatgagcggggccctctggagcacctctactccctgcacatccccaactgtgacaagcatggcctgtacaacctcaaacagtgcaagatgtctctgaacgggcagcgtggggagtgctggtgtgtgaaccccaacaccgggaagctgatccagggagcccccaccatccggggggaccccgagtgtcatctcttctacaatgagcagcaggaggctcgcggggtgcacacccagcggatgcagtagaccgcagccagccggtgcctggcgcccctgccccccgcccctctccaaacaccggcagaaaacggagagtgcttgggtggtgggtgctggaggattttccagttctgacacacgtatttatatatggaaagagaccagcaccgagctcggcacctccccggcctctctcttcccagctgcagatgccacacctgctccttcttgctttccccgggggaggaagggggttgtggtcggggagctggggtacaggtttggggagggggaagagaaatttttatttttgaacccctgtgtcccttttgcataagattaaaggaaggaaaagtaaagtgtg

SEQ ID NO: 6477 - DNA, 40046 bp, Homo sapiens
  misc_feature (1)..(40046): n=a,t,g or c
atattatattatactatattatattataatatactatattatattatattatattatgttatataataatatattatattgtattatattatgttatataataatatattacattatattatgttatataataatatattatattatattatttttgttatataatatattatattatattatattatgttatataataatatattatattacattacataataatatattatattacattacataataatatattatattatatattagaatataatacataatgaaataaggaatataatagaatattatttcatagaatagaatagaatattatttccttctataatagaatagaatatttcattatttcatcccatattcattatttcattctataatattatagaatagaatagaatattatataatgtaatagaatattatttcattatatattagaatataatatataatgaaataaggaatataatagaatataatagaagtaaagtaattattataagtaaacacagtagaaataaagttcacaataaatgtcatgtgtttgaatcatctcgaaaccatcctcccccaccacctccctggtccatggaaaaaatgtctcccatgaaactggtccctggtgccaaaaaggttggggactgctgttctagggccactgagtgattcacaggacaggagacatttgtgaggggctccttggggacccctacttccctgccctgtaacatccagcctcatgtgcgcacgtgttcaacttcatgcctttgacttagacacatcgacatgagcataccggccttctggttccaagccagggttccataaacaaatccttcttagttagccttggtagctcaacacctttggtatctcactcacttaactgccacgcctactcttgttggatccggttataaagtaaactatgttctttgagaactgttgcatacagatgagttggcagccggtctgagctggcccacagactcataaaatcaacagggcctcgggtaccctcacccagcatatccaaactcttgcatcaaaggtgcagggacttgctcacatcgagaatctggttgctttcttggagaccaagaaaatgagtttttgtttctacatttactccagcaatccatgaggtaagaggagaaacacctcattgtctctttgtaggaaaaagaagttaattcttgtgaaaatttagacctcttttccccgcctcaaatctaggcagacttgtctgtccactcctgggggatagatagaagcatggttttaactcactcactggatgcttttggtgtgctggttacatgtggattattagctgtgtgctgcatcttgccttccctgggtcactccgcagccctggggctggagggcagtaagaatctttggttgcatcatgcctgattccaaagtcttcttttggtggcagagatgtatgtagggttttcatctctggtggcatcctttcaattgtagcaagaccttgcctagtaacacaacctctgccaagccgtttccatctttaaggtagaggatcaaggtgctagtggggtctattatggaaaacatatatcaggaaaaggcaagagttagccaggcattttgattaccttcacccaaatgtctttctttcattttctgatgtaggactttataggaattttgcaccattctgaatggatacatttggatttctcaacatttgttcagcttcctaatgactgttgtgacaattgctctataccagtgaatgccaactgtttatctctgctctgaacaggtatggagccccttctcccaatatctgtatcttacagatttggtgcatagacgcttaaaaggagttggtctttcgcaaccagcaatctttaggaaaaatgattgaatttttctccttttagctgggcttacaaaatggagcaaaacatagtgattgtgctatggaccttttatggacagggacttggcagagccactcactggatgcttttgatctgctggttgtacctggattattagttgcgagctgcacgctgccttccctgggccattccgtagccctggggctggagggcagttagaatctttggttgaatcttcggttacattggaggagctgcccagtctttgtgggctcccttcagtcatgggcttggcttgtgttgtcttactctacactgtttagtgtaaatggattctcactaagtcagcttcagcttttaagagcatgatggggtggagatatctgggaacgtatgggccatcagaaaagcatttttttatactcaagtcatgaaggtggatttgttctgtgtaaggaggtgcaccaagtcagtgtaggtgcaagactgcccttgtaaagaagcagagtatgtgaattccttgtgagtgggcttaatctttaatgctttaatgacttttggtttgcctgattttttttaatataagaagtttgtaattgccaagcatgcttttctgtgaagagctaagtctcaaaattccccattcacgttcttttcctttcctcagtaatgtgtttttctttcctaggttatgaatctaccctgcaccttgtcacagctcagtaattgtccaggaattcacctgtaactcacatgctttgcctttgacttgctccagggtttccatgcattgaaggcttcctggtgccctctcagtggaattgcttctggcctggcagtttgatcctgagggtgacccaaatgtttctccccttggctccataatttaagatgccagtgatgactattgtgtttgttctcttcattcttgtctttctcatgactattattattatacatacaggtttttttcttcatttgcctttcaacaagcttgtacttagaactcattgtgttttggatgctaggtcctgggaaaccactgaatggcttgggaaatgctttgctctagagggctggtacttgggctaggggctatgtgcatggaaacaggctctcacacgctaatgggagagatacctgatgagtggggactgtgacacagaaatgtagctcatagtatcatcgctgcctgcacagaaaagtacatcatacttttcctacagaggacctcatggaagcatgaaccaaatgcgctgggtgggcaggaaggggcctactggaggcagggggaagaacattctagaacaaggaaatggcatttacaaaaatatgcaagaacgagagagagcatgacttacacagggaataccaggctggtgtggctgagggtgggtggccaggggaggggcgagggaaggctgcagggtgccacgatgaaggacctagtatgtgatgctgaggaacttgggcagtgtccggaaggtggtgagaaccggggtaagatcttatttacattgtggaagagttgctctgctgcacagtgcaaggtggactagagtagggtaagaccacggccgggtaatcagggaggagattaccaagagggagaagacacaaagtctggtggccaatagctgcagagagtgatggggacaggcgaggatgaagtggagctctgaaacaggagccagagactcccaaagtccgcaaaaagagcacactttgaatggcacagacccttttccttccactcaccctcccacattcaagactgtgatgacctaggctcaagccaaaagtatacagaaaagggcctaggctttcccaatctgctctttctcctgaaatatatatggttcaggaatagtattagtactgctgtgaaatagcaaaaagtggttggctcgattatgtggttcagaaatcatcatgaacaagcagggtgtgcagaaattggaaaaagaaaacaacaaaaacaaacatcttcaaaaaatgctgaagaaaaaaattagtgtagagacatataaaagatagacccctagaaaagtcaacaataggcctggtgcagtggcttacacctgtaatcccagcacttttggtggctgaggctcatctgaggtcaagatttcaagaccagcctggccaacatggaaaaacctcatctgtctaaaaatttgaaaattagccaggcatggtggcacacacctgtagtcccagcttctcagggggctgaggcatgagaattgcttgaacccgggaggcggaggttgcagtgagctgagatcgtgccactgcactcctcaagcctgggtgatagggtgagactttggctcaaaaaaaaaaaaaaaaaaaaaaaaaaaagagagaaaaagaaaaaagaaaaagaaaagtcagtaataaaccttaaggtcaaaccttaagttaccttaaggtcaaaggttgttccttcctccacgcaggacgattctaagccatccttgcagaagattgtgaaggatgtgcaaagtgtcagcctttcttgccattgcctcgtcagaatctgtgagcaaacggaaaaaagaacgatgctcttacacatgaaactcctggattctttttagaaaaatagcagaaagaaaccaaaaatagtgcagagaacaggtcgcttcaaaactattgaggatccaaagatgttctgccctaaggagttgcttctcaaaaactgttattaaggtccttagctgtcaaatataaaacccaacccaaaagcattccatttaaaaccagagcattgaaacactaattttgaacaatcattgtaaagcctcatcaaatccagctcactcattgcagaaatatgcaactcaaaggccctaggaaaaatgtaaatctgaattttcccagcactgttttggatgaataatttcctctctcagaagaagcctgttgttacttttcaaaattggttccccagtatgcaacagagtccatctctgcatgtgtgtatctgccctgtgctgtgttctgccattaccatgctttgtaaactttgcattctggttagatgcgtgtgactcactgatgcttctaagggaagattctttttgaataatccttgaaatacaagccagatttttccatttatttagaatttcccaatgtccctgcccctccctctgctccagttgcacacacaccagtgtttcttggctgggattcaggaattgtatttattggggtctatcagtgtgtcaccatatccccagggaacagatttaaatatgcaacccaacacaattgaaagcaacaggttaatactgtctttgcagagttaaaacagcccaagttctctcaggtgactacccgtaggggaagtctcatggttcgttgcccttgattaaattctcaggagctttctggctttatccagatctaccatttgtccttgaagagctcagcagaactcagcaactgtgaataactgttgtgggtcttttcacaggagaagactctgtgaagtgtgtggccccttggagtccgagtccagtgatgagatattcagagagataagggtaatcccggtctcatgctggaaagtgcatgtgaccattttggggatcagggtatttggatgctgttaagggaagtgttggactgctgatgaattatgcacagagtatggggagcttgaatcgggttcagagataagccacaggcatgggctaaggtcaccttagacctctgggaagcccccgctgtgctggccttagtgaagtgtgatgacacagtccctatgctgcagaagctctggtccccgtgaggggatgagtagggatggcaggtacaagagtggctgcatgacacatcagcgaactggcagagcatgagcacgttctaacctaccaaccaggctccccgacccagtctgcttctagggcagccccgggggggatggagggggcggtaggacacagggctgtttcctctcccaatactccatcccctcagagggagtggagaaggggagtcaggagacccccagagcgctccccaggaccaggtctgagagtcctttccaacatgggtctcctcactcctagtcctgcttgaatccattgtgcataagaatttcacacccagcctgggcaatgctcaccactgaagacacaggatgaggtctgctgggcacggaggctgccagagagtggagaaaaccccgtgccgcactcggattttcttccccttattactgatacacctgctcctttggctgggtgtttcccagcctgtggagtttacagatttggatttctacaaagttgccccttaagtatcttgtggcagtggggaaaggggtggagagactgggaggatggcactgcagcaagatgagcggtgcgacccaggcacccagcgcacagcaggcaaatcccttcccacgcggatgaccacggccactgggacctgaagctgggaataggcagccaccggagaagcgcggccgagagctgggggctgaaactgctttctcatctatgaaggggctggttttctcatcctcactgaagggccagaggaaattagacttcaacctcacccgttaggatgtgggttggagatcaggaagaagcttgggttttaggggtgtggagaggcaggagtccatttcagcgggaaatggacacaaacttctacagacacggagcctgcatctatctttctgggaggggttccggtggccgcttaccgacaggcagggcacggggctggtgtttttggaaatcttatcacaaggccctcactcctgggcttgcaccagggaggcgagccccagttatcccgctctgcagtggctcccaggagcaggggtatgtttctgacgacagtcacctctggctattgctctgattctgcctttcttcaggttgcctgggtctatcccataaatgagcctgtgatcactgggtacaagctcccttgcagcttcctttctgtctgaggtcccagggatacccgctagccctgctgctcacatcttgcctcctcactcggcatgtttctctttctgttctaaatgtcccagctcatgcccctccatggtaccatccccattgaccccagccccactagggcccccaatcctgggtctcagctgccagtgaatgctgcagccctgcaacagttgctcagtcagcaccccacgcagaaaagcgcctcgggcggaagctggcggcaccagagtttctgtctttgcctgcgtagccatgtgggttagggagccccagggacgccaacagccagaccacaggcgggctaatttccaaatgctgacacagtgaatgccacccatatttcaccagtgactggagagcagatgctgggcattcgtgggccctgcttgtgcctggggatggagagaaggcaggacacttgaggcagatgccagtgctgcctctgagctgttgatgctccctgccctggagttcacaaaaataatcctctacatggtgcatagagtgtttttgtgttttttgaagtattacaggcaggccccggcgacatgatcttcgtctcccagatagggaaattctaaaaatcaggaaaaggggctgggcgtgcccctgtcacatagctggtaattggagctgggtctctggccttcagggcactttcctctgtggtcacacctgggtttcagagccacctggcctccacttttctgagcagcttccttcagcattttcttgtttcctctgtgcttgcatcccgcctgccccttggggtcaccctgtttccaggctattgcgtctccaggccccttggtccagctgatgtgggttacaaggaccacccgtgaggtggcagtgggctaattttcaataatccagttggtgactgttcttcagagagaatcttctggaatctctgacttagtgacggcacagagacttcctgagttccttaagtcacgtcttccttcccttaagtcacttcttaaaaaaatcaattcatttctacaagaactcatgtatgcatttcacacagtgaaacctgtgcagtgtcacgcacttatatcagacggtcattgcctctcttttacattgtcagtatggaattcttcacgggaaacctgccacagtgtcctgccggcctgtctagtcaacagttcttcatgtctcactgaagtccctcttgccataaatcaagtcatgtttctatagtgtcgctcatccatccggattctcccaagcactgcatcatttgggctgaacgatggccctgggaagtagatagcatcattgtcatctgacagaatgagaaatccgaggcctggctcctgcccggtctggggccagacaggtgtccttccgggcgcccttctgaaatcaatgccgacctctcttgcgcagtgccctcggcaggcgccagggggcgtgctgctgctggtaagcgggaggcccggcggaggcgagtgtgggccttgccgcgcctcctctcaccgcctgcgctttgctgcccgccgtctgcagcaccagtgcctacttacgggtacttttcaaggtcacttctagttactgtttctttctaagtccttatcacaatctataattactctgtttatttggctccttttaatttcctgcccagctcccccacttccctgggtcttgagaaggccgtaccccagtgcccagcacaggcggctcccactacagatgccctgagagacgcagacgggagggctagccaggagagggcacgcagggaagggaggtgaggagggagggccagcctttcccccagaccttccttccttttccctcctgccttagacataggaattcactcatcttctgggccagatctttagggaacttggcgtggagacatcaggttaagatctgggttctgtccgggagcggtggctcggggctgtaatcccagcactttgggaggctgaggcaggagaattgctggaggccaggagttcaaggccagcctgggtaacctagtgagacctcatctctacaatcaatacactagcccggagtggggcacttgcctgtggtcccagctacttgggaggctgaggcgggaggatcccatgagatgggaggtagaggctgcagtgagctatgattgtgccactgcactccagcctgggcaacagagcaagaccctgtctcaaaaagagctgcgttcctaccccagttctgcctcatatgagtttttaaaattctctaaacctcagttcccttccttgtcaaacagagaaaattagacctacttcatggggtcgctgtgagattgaatgaaataatttctgccaagcccctaccacagttgctggtatgtgacagagattcaacaagtgtctgttccttttcccctgtgggaattccatgcctagaagggactaaccatttaaccccaatcctgtagagtgaaatcaaccccttatgtgccttcaatcacataagaggggtgacctgcctggtggcatgggggtctggtagcaaatacactaccacctttcaggtctgtgccaaagtcacatgggaaaggatgagttttaatgagtttcttccaataattaaacccaaggtagacatatagctaccaactgagtcctatagtagactaaattctaaccttctagctctgtgaacttggctcaatcacttagcctctctggtgtttgatctcctcctttagacactgggaatagtaatgctgtctacgtcacagagtgacatagacgctccgtaaactactgagtttacccctggagaccgcctggaacacagtgagatctgttaatgtcagtgatttctggtccatggatgagaaggaaaattaccccaactgaactagtttcaagaaaactttatggaacatttattattggccagtctcttttatacatcttgtcttccctcaccttcaaataactctgaaaagtatgtgcccttcccatttttcattcattcctccattcactccttcaacaaaccctagctgttgccacggagacacgtgccatttgaacagttgttaatcgtcaatcaaatatggtggtgcagagttgacatttaactgttcttgcctgtttttcatggtagggctcactgctgtgttgcgaacctccttaaggagtggatgtttttctctgggcacttctgcttggtctgtagcatgcatttccttgtctcttcattcttagctgctcttacttgccagtgttctttgcctccgcatcccttctcatccctccccatccctcgccatccctcgccatccctccccaaccctcgccttccctcaccatccctccccatcctgccccatccctccccatctctcgccatcgtggagcttctcgcattccctttgcccactctattttatctacattttcttcagtttctccaagctcttgcacagggtttagctgctcttgcactttttaaaacttttaaaccctttattaagccaataaatgctaaaattaggtagtttttaaaaatgtaaataaatacccagaaacacatttttatgtatgttttcaggcacaatattgagttcaaaatacatgagatctatgtgctattactcactgtagaaaatctaagcttaacttaaaaagacaagatggggacaatgctcccaggtgcatcctgagccattgcacaggcactcgtccttgccacctgtcagcattggcacttatgaatccaccatgtgcagtgtccacaccatccctggatgtttgcttggtcattagttcagtgagcaagtgaaaaactagctcagctacaacttagagaaaaaaatagcttctctctcccctggccttctctatttggagagagccctgaggcccagtgagcagtgttgggtataacatagggatgcagctgacaggtccctgcacttgtggcactcccagcccaggggagggcactgaccttggtcaagaaagatttttagagtctctactgtgggtccacatgctgggtattcagaggaaggcaagacgggctgctgtcctggagggtgtgttctgtagaggggagatcgacaataagtgaatgcatcaccagcagggaaataaacaaccaacctgacagccactcttgataagagatggaaagaagccaagacaggatggagttcccactggagcagtgggtgctaccttagattggatgctaaaaggctctcgaagaaggtggtgatggagctaggtccctagcgacatggagcagccagacatgggaaggcctagagcggagcagccctgaaggaggaagcagcaggtgccgaagcccagggcaggagctgcgccgcacattgcagagcagagggggtgggaacatagtgagctaggtgacagaggggatgactttgggctgtggagtgtggcagagtcctggctatatggggccttgaggtcatcagaacagggggaagctgagaaaggtctcagcaaggcagcagcatgatccgattttcaggactccttcctcactctgacggtgtggactctattatgaggagaaagaggcggtggacagatcaaggagcaggcgagttttgtagcccaaccaaggaattatggtggcctggcaagcagaggagatgaagagaagaggacagacaggtcctgactatattgtgtagaaagagcagacaagatttgctgatggattgcgtgtgaggtgagaggaagaaaagaattaagggtgaatcaaggttttgcttgactcgggggtgggtgtgccattgacagggctgaggatgatctgaattgaacaaaaccaacatgaaatcagttgtattcagtgctaagaaggaaaagaagatggtgctaggacatttttttagagtaggaatttcagtccaagatgcctatgcccagatgtgctgtcccagcgtacatcacatgtggagctgcccctcccctgctccctcttctgcggtcctctctctgccctgcactctgaggtgcacatgcacctctcaccccagcctggtggccatggtacctgcaaccctggccaagagcttccagagaaaggattcacgccatggcatccatcaccaagccctgtgccctggttgcctccgggtctggaaggctggtcgtgctaacctcagaggaaattcagttggtctggcacaattgcatccttctcgtctaacctaatctcatcattccatgggcaatctttttctctctgatccacagcctttcaccacttcattaatttgtccctagcagccggataaacagtcttctccctctgggcctcatgtacacaaagatgcttctgacaggccccttgaaagcagctcagagcctgctgtcttttcccgcccggaagttctggtgggagaaccttctttaagaggctccaggaggggatgaggggagggagaaagaagacttcccaagacctggcaagagccccgagcaggactatgcatccttcctgcatttcctctgcagctcacacaggcacagtggtaccgtccttgggtctggcaggtgagagctgcctgcccaaatccagacctgggagttaaaactgatttccccaagtgccaactcagcctttggctgtcccagtcctgatctcttcatcagagcccctcagccctgctaaacaaggaaggagcctggcatttattgtggctttccccataccagatcctctactgggccttcccacacttaatcctatctcagcattgggaaacagatttccttatttccatgttcatggaggagaacgttcaggtttagagaagccaaataactcactctgataacaagtggaagaggtgacgtttaagcccagctctacaccgccttatagcctatcccctcactattttcaaggcacctgtggagccccatctttgctttgccaacctcatttgctgcctctttgcaataatgtcttcaatcttaatgctgatcacagcttggacctcacaccctctgggtgccagggagccagcattttggttagtactaagcccagttgtcaatctcatcacaattcctagagggcttccttctatcctcttttctccatctgctccagtgaagctcaggggaccttggcaaggtgggaaaggtcaggactcaaatgatgttggggaaaaagaataaacccatcactgaaaatgggtacaattattggaaatgtgggagggtaagaaaagtgaatcaggaagacagtatgtccaaaacaacaaaaaagaaaagaaaaggaaagaaaaaccgtaaacagctcacaatgagctccagggtttttactgctccttacgtttcttagcaactattttttgtttgttttccaggcttaatcgattacattgagaaattagctctgtaaaatccccaggtgagctgctgggtcatgcaccagtaagctgcagagctggaattcaagcctgactccagatacgtgtttcaaggccagagactcagtggggagcctgcacgtgcgctccagctagaccaccttgtttcttttcataggagttagtactcatagcacaccaggggcttcagtttctttccccaaacccatcgtgcatctatgatacttaagaagatctaggtttggccctgcaggtgtgtcatcaaacagatcattacgatttgtgctaatccagattaggatgttgagaggtggtggttggggacattctttgtagctcttgatagtggcccttattcaggaagtacgcaaggaacatccagccctgcctttgagaaagggcccagcctctggacatgcacagtgggaggtttctgtcattctcccgtgagtccttgaatgtagactcaacacaactctgtgccctgttgtcacccaagaaagcagcaaggtccccatcccagtcacgttccatccttctctctccttggtgtatgtggtgtggggtggggagcagaggtaagtagtggcacgggggaaatatggggcaaggcggggttttgaatgggcccgtgggcctctggcttgtctgcgaggtcatgctgagtctctggaggggctggctcaaatgggaattggaacatccgcgctgctgactccaggaatacaacaagggctatgggcaaggaataaaatgctcaaaaacattcaaacaaaagatgtgctgaaagaaggagaaagagggagaaaagaaaccgagctcccaggagagccgagagaaggagctcttgcttggctggtgcagtaggagggaccctgtgagtttcctcccatcccacagacctgccctctggcactgggaggtgtgagggacttcaccctggagctgccaacccaggatcgtaaccaaacaccgttctcagacctgcagagcccaggtgcaggtggatgggtgggtgggtgggtatgagggcccacggcccagcctggactgcttcacccaaacacacctgggcagcagcagggaagagcttctcctgcagaccctgggagaagagacatctcccacactagcagaggttctgtttagcagtgagggtgagcagaataatactttccgtactccaagctcttgtggcagagaaaatcattctgatggtggtgccttcaggagcacagtaaccacttgctagagaaggcaggtgctgagttcagccgaggttccaacaagggcccaaaggcatggggaagtgggttgagagttgaggggaagtcggtcgcgactgtactgtgtgacaggcactttacatgtgtgttttttctatcccagctttattgcaatataattctcataaaataaaacccactaatttgaagtgtgtaagaggtggttttcagtgtattcacagagttgcacagccatcattacaatcaataccggaacattttcatcacccccaaaagaacctggtgcccattagcagtcactccccatccgcctcttccccagcccctggcagccaccagtctaactctctttctctgtagatttgcctattctaacatctcatctacatggaatcacacaatctctggcctctttcactggccaaatgttttggaggtccatccatgttgtagtatctaccagtactttattcctttttagagctgaataatattccactgtatggatatgtcacattttatttattgattcatcagctgatggacatcaactgtttcaaaagcttccactctttggctattatgaataatcctgctattcacatactcattttacgtggatatgtgtatttctcactgaatcctcataacaacaaaggcactagaatcatcaatatagtatggaaaagtgcagctcagagaggttaaggaacgtctttgagactgaaacgcttcttttgatttggcttgattttgatagaatggcaaataagtggaaataaagtggaatttaattttaccttttccaggtcattatacacaccactgagtgaaaagaaacaaggaaaggaatgagagaaagtgcgtcagcaggccttttgtaggtaccaccggcctctgcctgagaggtcggtctcagtgagggccctgagcttgcctgccttgcatggctctaaggtctagggggatccccccttcctgcttgtcttccttgttttagaggcagacacgaggattggtcaagagcagttcaagacatttgctggaggacgcagctgggaagtctcccgggcagtgtcctgttctgagagggctcctgggtgggctgtgcccggtaatgaggatgggggcatgctaaatgccagcaagaagagccccagtgagaagactccagcatttgctgaagggcagctctatggcatggaacaaagggtcaccgaagctgctggctctgctccctctggctccagggctttcccagaaagcacttgaacatgggagggtgggtgatatgacgtgccgctccattaatgtaactctgatggcttggcagaacccaagccgaaactggtaatcattgaccctttgagggtcaatgatacccgtgggcatagcaacggagtcaacagaaatgctggctcttccactaatcccctagagcctggctcttctcacctcctttctgagaagcaggatgctattgcagcctgcacagtagcaagagcagcccaggattaaaggcctcacagatagggacaagattgcctcctttcattcaatgcatggcaggagcttgaaggagaaactggagttgcacgtagtatgactcaaggtattaacagcttgatcacgttctatgtccaagtgtggtctaagctctttccatccatctgtaagatagatataaaagcccccatttttcagatgaggaaattgacacactgaatacccaatgttagagctagtaagtgactgatttcagattcaaacactggaaacccacttcttaaatcttaccccataggccacttgttgggactgggacagagaaactcaaacacgctaaggtgtgggcctagaaggcatccaaatccctctccaaacccaagcacgtggtgctctgtgccttagatcttgtgtgtctgtggaagctgggctacaccagccttctttgcctcatgcaacataatgaatactagtctccgagtgtccatactgaagacattagttgaattttttccattttataaattgtcaaggttgggcatcctatatgttttctttaaaacaaagtgtacattcttgttgcagacgctcggtaaagcatgttcaggcctcccgtccacatggaatccattcctttctggtctggaaagactgagttgatttaataccaacccaaaccacacagaactagaagggtcagactaataacagatctctgcacacataatagctacaactttttaataaacactggaattccttcattaaactccagtgccatttgaggtgggtggctgaatatgagacttaagaacagtttcattacagatttatccggtttttagaacaaccatctcctcctcaacacacacacaggataaacaagtggaagaatgattatttgatttgcaaaaattattcttcactttataaaataatccactataggattcctataaatatctaatatcctaatgcatatgtaatatgattcaccatacacaatttctgtctacatacatcttttgagagtatacagtgatttcaatatggaattatatatctagatgtgtacaatgatattttcaaggcagtggtgttctttttaatagtaataagaataaacagaccatgagaacaggaaagactgtggatcattgtgttaatttacttttcaatcctaaattcactagaaactagaatgggctagttagggagatgtggcctcagtgtgtggtagaggtttgagaacttgggttaaagttgagtccactggagcccaagctgacctttctacctttgctgatgtggagggtcctgtgtgttcctggtccaaactaactgaagtttcaccctggcttctgtgtgggcctgtcctctgtctccagacagtagccatatgtgttgtattttaccaggtttcttctctactggccttcatccccatcctgggccctgacaaagacagtgtgacaagttctgagccccacaggtggaatcccaaaccaagcagctcttgctggtcaccccaagatctacttatacatgaagttttgaaaatcatctcctgaacctcttctgacagaggtgagtggcttgattttcaataagcaactattggacaccccaggctacaagaaagctaggtaagcatttggttatgcagagcctcttaagcaaaggctgtgggacctagtcatttgcccttgcaggttctgcaagtactgagtcccaccaccagcatcagagagtggtgttaggctggcattgctctctccacagcccctttcaaaaatcaagcactttgagtcatttacaccttcctatatctgtttatttccttgacagatacctgttgagcctctgttctctgcctggtgctggggtaggcagggactggggacatggcagtggaggagacagcacaaaagtaaatgtatcagttaaaattactgttcataccacaaatgaaaggaaagcatacagtcaaattttgcaaggagaggaaacttgatttaaatggggagggggatcttcttccttctttgagaaactgacatttaaatgtctttctgagaaatgacatttaacttgaggtcaagaagttggcaagggggtgggtgtggcgtgggggagagtagagctccaagggtttccagccgaggaaatagcaggtgatgtaggcccagagaggttaaacgacctgctccagcctctatggttggaggcgggggggccctccgatgtgtccttttttgcctttgtattcccagtctgcttcctggacatgacctcagtactgactccaaggtcaagagctttgccctctgctagagcagtgagtgtatggggctggctcatcgtcactggcaggtttgccttatccaccaggtggtgggttggcgggcgggcaggaggggttggaggtgttgcctcctcttcccacaggagccattgtcatcacaccaaacttctgcctatagaagaagtaacaacaccctgtagaggcctacagatgtccctaagtgtaaaatgtcactcccacaacctcaggccgtttgcttatgccaggacaatccacagaagcttccaaaaaaaagtatgatgctggacagtgtatcttcagctgctctcatggctgcttcttaattctgttgatatcataaccatttctaaactctgcctggctctgccaggcccctctcatgacatcagggcctatggtcttctcctccaacacacaccctcagatccaacccagggtacctgctgccctctccatcgagctctctccttcctcctcttgtagtgcttttgtagatgctgcaaaaccccagaaaactgtcccctcctgatccttttatgctcactatctaaaaaggtttggacccttgctagctctcaccctctcatgtgatcactcacacaaagcaaggaaatgtatagaaaaccattcctggcgcagagtaagttgatgctgaataaatatttactttccctctacattgtttaccaactgtgttacatatgctttagggcttaaaagcaaagacttgtcagttgggaagatctagattcttctaatctttgctctttgggctttctgctttgtgaccttggataagttgcttaacttctctgagcctcagttcccagcctcctagagttaccatgagtttaaatccaacaacacctttaagagattttgtatccgtgcctcggatgacactacaggcctttgggggcccagaatgccactactccagaggggcaccgctggcatcgtgctccagggggcgctgttcactgagactgccgcagcgtgtgtctccagcaacgggcagcagactacagaagcccattctggccgccttaatggccattccacactctctggagactgttatcagccccagcctttttcttcattcatctgtgccttgcacttccatttttaccttggtttaccttctcaaccctggctcaatccacttatatccaataaagcaacactttcccttaaagtgcagtactctgaattttagaagagaaaaattcttagaaaatctctagtatagccaagtagctcccattgtgtggcagtgagtttctcctgtcccctagggtgctccagctccttgtcactgttcctcacagcccctgaggatgtgctgctctctctttaaaactctgaacagggcagggatcaagtgcttcttttggtctttcttcatacagctgagacatgctagcatttctgaaatatcttaagaaactattatgaagaacaacaggaaacaatattggaaatacagaggccaggcatggtggctcacacccgtaatctcagcactttgggaggctgagggaggaggattgcttgaggccaggagttcaagaccagcctgggaaacatagtaagactccatctctgcaaaaacaataataacaacaaaatcagctgggcatggtggtgcacacccgtggtctcaggtactttttttttttttttttttttttgagacggagtcttgctctgtcacccaggctggagtgcagtggtgcgatcttggctcactgcaagctccgcctcccgggttcacaccattctcctgcctcagcctcctgagtagctggaactacaggcgcccgccaccacgcccggctaattttttgtatttttagtagagacggagtttcaccatgttagccaggatggtctcgatctcctgacctcgtgatccacccacctcggcctcccaaagtgctgggattacaggcgtgagccactgggcccagctggtctcaggtactttgaggctgaggcaggaggatcgcttgagcccaggaggtcgaggatgcagtgagccgtgattgcaccactgcactccaatctggatgacagagtgagaccctgtctcaaaaataaataaacaaataagaaacaaaagtaaagaaatgaaaaagtaaaatacatacaggataagcattcaccttccaaagcattgatttctgactacagcaaatgtgggctgccaccaaagactggtaagacctcacaaacaccctgcccgggttcaggcttcactagctcccagtggtggggacatcacagcttccagcgcttcccactgggacccaatcaaggtgccaagcagaggtataggttttgtggtcagagtatagttatcttaggataaccaatggctttgggaaacaagttagctagatagaattcaaaagccgaacttgaaatttttaactcattttaatggctttttctatttaacttggctatatccttgattcttcacttcttcatacagaaacaaacatatgtaccaattgcacataggcatgtaagacttgtggaagccacggaatggaattggttctcaccagtgggcttgtaaagtggttttgttgtgttatagttacacttatttcctgtgctcttagggtcttcagtggtcagtgccctccagtcagaaagcaccagtagtaccctgtatttgagcaagttggactttttgcagctatggagaactgcaccataaacaatcatggggcgtctcactgagagggttttggaaaggacttgcataggatctgggcatgtttcaggtgatgcggcgggggaggcttaaggaagcaatgctttgctctggattaggggctgttagggagtagtgatgattctatgatcaaatatgttgataattcttattatctaggtgagaagactgacatgagactaaagctgttctggggaaagaaacagcagacactcatcaggatggggggatattcggccattttgtggcttggacaatgtttgtgttttgttggtgttcagacatgattacagagtggccttgttttatcccaatccatcatgatctgagtggcctggtctgaggctgatgatttgtgagattgcttgtgtttaacaggagcaagacccagcctcatgtgccaggagaaccaagacctcgccggtagtacgaggtcaccttccagtggcctgcttttccacagatccaatcctagttaatcctaatcctagggtgagagaagaacagcatcaagcctcggtaccgtcgctcagttcagccttgccaaggataattctctccctctatcctgttcccacctctccaagacaagtcttttgccctgattatagagaaaacctttataaaacatgtttgtattttccagatcttctgttgcgcactgggaggatgggctctgaagctagcatagttgatagaccagatatgttgtcagaaccttcatcactctcacggaagccttttcctccattggctgtagtctccaatatggcccatttcgctccaggaggtagaccccgattggcctggaccagtgacccctgattaaactgccatgctagtttgaaatttgggaaccagttataataattgtagctatttattgcataattactattttctaggaactttacctatgctattgcatttaaatcatacaacaatgtttgagagtatattatagccatttcacaggtgaggaaactcacctgtatcagcaaaggtcagtggtttgcttagctcacctgactcttgggtggcagagatagggttcaaatcaatgtctgtgctaacccgagctagaagcccgtcgactctgccatgctgcccctagctgttacctctctgggaacattactggccaggatctcctatcttctcctgatcccctgtgcacaaaaggacaagttattcagaaagtgatactctggatggctggcccagagacgcctacagaacacagtgtgcctcctgagagtaccaacaccatcagaccttgtgatgcttcagccctttttccccaagctctcttctctggaaggagggaggcacctaggaaggcccttgctgtacacacaccctggatacagacacactctggttcatagcagtggggacccaggagtatgctcaccctacaaaaaagtagggtattcctgaagtgcattcccaagtctagcctggaagagtcctgaagctcagatgccctcttctatgcccatgaggccaggaaagatggtttctaccagccttgccaagttctatctaaaaagagcccatgctgttcccatgtgagctgcctgatagtggtaaagacatcagagataacttctctggcattaccgaacagaagggaaatgccactctctgtctactacaggttctggatgtgataagtgtagtctgtggagctagatggtttactgcttctcggggctctgaacctttgcagatccagcagggtggtgatcctccaatagcttgagatgattttcatagaaaacaggaagtcctccacagcagcagttagatgcacttgttttccttccttagcaaagctgagtaagaatacaagcccaacacccacccaaccttctgggtctcctctttgggactgccttaacatcgtgtcctcaatcatttcaaggcagcaaacctgccacattacaattcttgaattacttattcgtgaacaacttgagagcagggactgttaccttgcattgtttcctagcatagcacctggtatatagtagatgctcaataaataatgtgtttgtttaattatattgattaagaaggaaggggctctgccccataatcccattcaatcattgcaatggaaaatcctcaagaaatgtttccagattcaatcgactgttgacaaagcagtaattttttcatagaaacgaatttcttctccatcacggttagaaagggactagagaaaatcatctgacttctcctctcaggccacatagctcatatttcctacctctaatctgaaatcctgactctcagaaatgtcctaaagttacctaaggatgtgcatgagctatgagaggtttggctgaaaggcagactgcaataagtgttttttttttttccatttctatagaggaacaatagacttttaattctaaatcagaagcggtaacagccatgcctattttccctttcccctctttgacatagtggctgtttgactgctgagcaggctggggtggtaagtgctgtaagaaatcccaaattctgaatgaattgttctcaagtggatgtctgtggaagaagagcttctgcacctgggttcatcagattcagtaaggaccacaaactgttggtccctcccttaaaatgagcacatgctgattaaagtagatgttgcataaaaatgaagcacatatttttatggagaaaaggaaattcaggaagaaaatatgtttactttcaagaatttgaagggctgttaaatggaggagacttaagacttatttagaattttaatgagatttctctgaagcacaactagaacaatgttctttataacagtttctcctttcgttctatgaaaaaaacctgtcaaatggtacaccaagtgcagagtccgttggccctagcttgcctttgcagcccagtgtctcactgaggctttctatgctccattatttgcttacttggaacttctttcagctcccccatgttttctttccttggttgcccctgcctgggtcacacagaagactaccctgtagtgtggttagtagtgcacacacaagacatctccattagagtgggagccaccagatactatgtgatataagtgacagtaagctcattgattttatattctcattgattaatgtatttatcatcattcagcaaatatttatagagtttctactatatgtgactctaactcatcttcagggcttggcctcagggttacagttctgctcatcaaaataggtgctccccagagtgctcccactgtttcatatcctgtcattcatcactggtcatttcatagattattgacacatttgcaccaccctctctgctgaaatgggagttgcatgataacaaggactgagtccattacttctctgatgtctagcacaatggtcagcacacacagtcaacattgggtatcaacatatcatcattgaatagtgattgataaataaattaatgtatacataaatgcaatgagttttctgccagttgaagtatggtttgcaaagaaagggtggatccccagctgatggggatctttttaaaaagttattctttttggcattataccaaccatgctcggttgtggttgatttccttagttcacttccccattagactatgaactccttgagaacaggaagagttctatttgtctttgaaatcctagcagcacaggcacacaatcagtgtttgggaagtgcacaaaatgtctattttctgagaatggattgtttatagaacaagaatgctgaggcactaaagaaaaagtggcagtaatgtaatccgcttgttttgccaagccactaaaaataccttggtaaatattagctaatgtgcagccctttgcttgctattaagatttactgatttcaatagaaaggaacctaaaaactgagcatattatataacccagacaccagggacaatctctaatcacctaagagttcataaaatacatattggctctgtctgtggttagattaaatgccattatctaaaaaaagtaggatctgtgcaataataggtctgccatgtgaatgacagttttggttagtggatgaatttatcctgtatcattgcattctctaagaataatccctctcactctgaacaaataaatcaatagcattggctaacccagtgcatgtaaaaaacaccttcagtaaatgccaggttttcccgaataataaagacttccaacaataaagacttcttttaagtctgtttcttacataactgttgtatggagagattaacatggtatcttgtttcttcctggtgtgatcttacttttgtcttgtaaatatgtacttatgtctgtatgttcacctgtatctttgtgaacccttggaaaactcagtatttcagtgggtttcagagaataggccgggagattgatgataagtaagtgtttccggccagttgttattaggcacaacttttaggagaaacaagtgagcgatagagcgtggccaaggagaggaaggcaatgctggaacccaatccacgcctgctgcccagagaccttagctgatggcttgtcatgtcttagcatgttggtattcaagccatgtgatgttggaaagaaaaaatacctattcagcttggggcttggtctgagaacaaccaattgccttggtttaaatcacacgactccactatcaaattaagtgtttccaagtttacacaaattagcgtcagtccactgactgtcgcctacaataaattaggctgagtctaaaagaaatcagtctgcatagaaagaccaacaaccagcaccacttccttgctttttccagccatgaatgcttccagtcggaatgtgtttgacacgttggtaagtggaggctggggaaatcacctctctggaaagccaggcagataatgtttcatcattaatgcagtcatggaaactcaacgttattcaagtgatcaatcagggggtacttcttcactctacagaaatcttctttacctttaaaagtaaaatgaaattaagggaggctagaggagcagggtgctgggaaaaaaactcagaagttggtgtgttaggagccatctctggaattataatgtatgacaaagagaatgtggattcaattgataaatgttggttttagaatttactatttgagctgagagtcactctctggagagctgggtaaacagtgtgaccctgaatgcacctgggagagaggtcagtccacatgggtgtagaccagggtaaaggatgtgtgtacaaggaaaggagaagaccatttccttctctgtacctcacatgcaccatcccctaatcctcactggggacttgaggtcagtgagggcagtgtgggatgagaggagggccctcttgactatgtgcattgctgtttattctcttggcagcattttctttttttatgtctttagaacctgccctcaacatttcaaatcaccacagctgtggttttctcatcaccgcttcgacttggcgttggcttcttgtgttttcagctgggttaaggccttgaacaagacactgtgggatatcactattatttaaaatgtatcactcagttggtttcgcttcctagttcttacgaataaacacatttttcaagggggattttgaaatctattttaaaaacatatttgcatttaatgaaaaataccctgaagacattgcggaccagggtgggcacaccttgatattcttgggcatgggggaggaggtaatctagcgtttatgactttgggtttcaccactgtcaggtgtttatgggacaggcccttcaccattttgctgtacaatggaagtcacagtaatgtcatctataaaaaatcaattgagcaaataggattttgaaaaatgtaattcattcactgaattatttcatttacgtttactgaataaacagtaggcactcatcaactgtgctagcaattgtgatataggaatgaataaagtatggtctgtctttatggagtattacttaaatcagtgctccccagtcctccagctttggagtagggaaggaagtgttagatgtgttgatggtggctctcatactattccttttgggaatcttgggaaaccgtggggagagagtaggaacaggcttgtagatttatggagaagccctatgagaccatctggttggatctgagctctgttctaaatagtgttcagcatttaacaaaaagaaatatgaccaatacttgtctgaaaatattttagggaagtgtgactttagaatataacatttgataactgagacacggagtggtagaagctcccctagactagaggcagggagccctatattctagttgtcatcctgccactggctaggtacatgcatttggacaagttatttaaattttctaaatctcagttttctcatttgataaatgagagaactgaattgaattaggatttttcttgatatatgagtatcaatagaagtacatagatgatttaggtagtatattgatgagtgttttattggtcagttattcatttttctatatctcaaaaacatacataatgcttcaagtttgtgatttctcagaaattattgcttaacataaggctaaacttatgagaaggtgatttaagtaatattcaataaataaaaatacaggtcataattggttattacaaacatatttaaggttgtgtgagactaattgaggtcaggaaacacttgaatatataatcacttagtttgtcttcatttctagctctctgtaattattttgcctctttatgtttgagtaacatggtcttccagtggaaagtttctatcagaaatagcattgtggtatccagaataaacttgtcagcttgccaaatgattagtaacccagataattttgaatgatcttttcgtagttaggtctttcatgtgggtcacctagttcactattgctataaacataatccttttttgtttttctttgatgtgttttcagatcagggtgttgacagaaagtatgttcaaacatcttcggaaatgggtcgtcactcgcttttttgggcattctcggcaaagagcaaggctagtctccaaagatggaaggtgcaacatagaatttggcaatgtggaggcacagtcaaggtttatattctttgtggacatctggacaacggtacttgacctcaagtggagatacaaaatgaccattttcatcacagccttcttggggagttggtttttctttggtctcctgtggtatgcagtagcgtacattcacaaagacctcccggaattccatccttctgccaatcacactccctgtgtggagaatattaatggcttgacctcagcttttctgttttctctggagactcaagtgaccattggatatggattcaggtgtgtgacagaacagtgtgccactgccatttttctgcttatctttcagtctatacttggagttataatcaattctttcatgtgtggggccatcttagccaagatctccaggcccaaaaaacgtgccaagaccattacgttcagcaagaacgcagtgatcagcaaacggggagggaagctttgcctcctaatccgagtggctaatctcaggaagagccttcttattggcagtcacatttatggaaagcttctgaagaccacagtcactcctgaaggagagaccattattttggaccagatcaatatcaactttgtagttgacgctgggaatgaaaatttattcttcatctccccattgacaatttaccatgtcattgatcacaacagccctttcttccacatggcagcggagacccttctccagcaggactttgaattagtggtgtttttagatggcacagtggagtccaccagtgctacctgccaagtccggacatcctatgtcccagaggaggtgctttggggctaccgttttgctcccatagtatccaagacaaaggaagggaaataccgagtggatttccataactttagcaagacagtggaagtggagacccctcactgtgccatgtgcctttataatgagaaagatgttagagccaggatgaagagaggctatgacaaccccaacttcatcttgtcagaagtcaatgaaacagatgacaccaaaatgtaacagtggcttttcaacgggagtaaagcaaagtctctaaagctcctagtacctagaagcattatgaagcagtcaacaatttaggggtacgaaagtaggatgagagccttcaaagtctaccagcacaaagacccctgagccccgcaattgtgatcccacaagacatgcatctccacaaggctactgtattagaacgtgcaatgcatttatatgaaactggtgtatggaagacataggtgctctcttgaaatcttaaatatgattatttgagctcatataaggtggattggagcagataaaattatcaaaagtttcatgaacaggccaaacaaaatattttttaaagtttccttaaagaagttatgaactttagaaaggatcaggggacaataataatctcattttgattctactgataagaatgactccacttttaatgtggacttttactcatggaaaaattgtctcctaatttggggagatgaaccaaccaatcaatgacaagaaaacgcttacacaaagaacaatttgaggctctaagcttctcatgtggtacgtttagacagaggctaaatctgcacactagaatcttgatgataccttcctgcaagacagaatgctttagttaaaagtggtgatgatatttctttcaatctgtattggatggcttaaagggctataaatctgtttataaagagcatttcctgctcttcgaagacagcaatgaggagttggaaggtgcaaagtcagtagagaagggaatgtatcattaatgcacctgagaagaaacagtttcatgtgttcctccacctagagtttgtactggaatgctatttctaaagaagaagtgggaaagagagaggaatgggatggagccccacagtcagaatgttactatgtctttctttccctgacagcccatcttcctaaaagggaccagcttatggaaggctcgaccttgaggggaaagttttactgtgaaagtcttcttcagatccccacctgcatcattccgaatgtgtcctggaaaaaaactggtactcaaagctgcttaggaatcaaaatgttttcagtgtgttgattaatatagtaaatttctgaaactgtgcatgcactttgattattattattactatgcattaactgagtcaggttccaggtgaaaatcctcttgcagagaggaccctctcctggaaggggcgggaggagtggagaggaagcagataggacacatttgttgtctggagtcctcaggaggaaatgaccctggccacagacacaccccttccggtacagctccatcacgcctctccagtgtgagtcttggcacataaaacggcagctgcccacagttgttgggagggatggcttatgtttttccatgcctgggctgtatttgtacagatccatgcaccactctggtccttctgactaagaacagtgggaagtctgatggttttagggttgcacaccttgtcagtggccataacagtggccatagctggcccatgtggaactctcactctgtacctgtgagtgctttggcaccacaatttaatgtgctgacaggaaaaagaaatcaggtatcacaagcttgagggagctggaattctctgctggcccactgtcatgatgtagccccttcataaactggagggaaactgtgttgacacttgttcccatcagcatgcactcttcctggtgtattctcctgctggctggcagcatgcatgtagatggctggaagtgagatggtcataagcaatccattccctttgattgttagggaggtgaacaacatacatctttctgattggtatttacttctgggttatttggtggaggcccatctgcttctaaatatccctttgctaggatcaagacactctgcacctggagtctcttttttaatggaaattcccattgaccctctagcaaccattaacacaggtacatccaattaagcccctaggaaaagaggcctggaacaggtaacttttgataggtctaaggagtggctggaaccccaaagcgcataacactcctgtgcattttaagaaagggggtaacaagggaatgggtgctcaagtagtaaagagaaatgaaaaatagcctgagaaggccaaactgcttgtaggttaacaccactgctaaaggctgcctttttattacaatgcagtgacatttttcccggtggaatctgactacatcagtactgctatttgctacagatgctgggttattctatttgctgatttcaaaagcatgtcaactgttctaatttccttcgtgaaaaactgcatcccatgatgcattattatattcaaaattttccttgagactgattctctttgaattgcccagttcatctctgttgctatggggattttgactaagagcgtttgatcctggttgaatcttcctggacttaggttggctcaagctccaatatttaagagttaagatttgggaggttgtctttaatggaaagcactaaatgtttaaaaattatttattccttaagagagaaaaggtagaagggaaagatccttttgtgttgccatgcctttttaagacatgggctgataggtgactgtccttctctatccatcactaaggggatgtgcaactggaccttccagaagaactccctgggcggattgcagagacggttgaggaagtgtcttccttggggatttttcatgaaacagaatatgggtcctcaacaggatgcttctgtgaatagcacggggatctttccctgtctagaacaaacgttaggacagcttctgatggaaagaatgcaaatgaacccggccccgcccctgggccgttgttgcctgccattacaggaagtgtgtgtcaatcaaagcttgacaggggagatagagcattttattttggaagccagaagtttgagaacaatgactggaatttcctctttctgtccggcaagggctgtttgtcattggggagataaaagtccaggggcagggaataaaggttatcgggaactgcgcaaggcagagccgtggggggtgggggggggtgggaggaggggttatggaggaaatctatttcaatgcctgtcattaagtttccattaaaagaacattcagttaggaattcaaaaataatttaatctccccagccagatgcacccagctggactccttggagctgagccccttggagagggagatttgcaccaccgttgcaggggccaggagctggggtgcgtctctacccagcgcactctcgactgcttgggtgttctggaagacatcggtatccttcagacaagtgggaaaccccaaggcttgtgcagtggcagaagaaagttatttactaggagttatttactacgttgttaccatgtccgaggttctgtttacagcattttatatgcagtccctcatgtaattttcccaacaatcctatgaggtcaagactatgattatacctttattccacttgaggcagctaaggtaaggaaggtgtccagagacattacctggaaaatggcagggctggcatgcaaaccccgggcagtccgctttgaaagcccatgagtttaaaatccctcgtcgacatcctaggagggaccatcctctgagcagattccccagggccatcgcacacttccctgaaacccacggatgactggcgcatgctcttgggatgcgtcttatactttgggagaaaccactcattgctcagcacaagacagagccctggcgagtgctgaacgaacatctctggaattgcaggttctaggaaaaggcagtcttttcccatgagctctaggtcatccaccaggtcagtatacggaagtatcatgggtgtcctgaagatttgattagcccattggtgcaaagtatcttcctaatactaatacacatacttctctctctaaatatacacaaacactaaatatatatacctaattatatatatataattaaaaactatgtgtgtgcatatgtatgtatacacatacacacacacatatttatatttcagtctttgatgtagaggcagatattatttccattttgacatgggaagtggagcctccattctccctggagaacagcccctgtgttctctactcacctctgtattcctagcaccagcagagttcctcacacaatccatacatggttataatgaataaaataaaccaatgaatgatttgctcaaggtctacatggctagtagtggattcaaacccacatctgtccaatgagcttttgactgacctatgtcattgaccagtcattagtcaaggggcctggaaaaatgacttaacttcattaagccccagtttctttatttgtagaatggagttttgtaatagagttaaggaggggattcaatgaaataatggatatgaaaaatccatctgttgaaagtaaatggctgtgcatatggcaacatgaggtgggagcaatgggtttgaaggtgaggaatgaaggggaggacactggtcccagagcaaaccctgcgcctggtgcttcaagggcaaagaaagcagagccagggcagggctgatggagaccagtggaggcctgggggacaagaacagtgcctgcaggggtctgtcccagctgggataggctatgagttggggggatttgagtagaatcctggtgctttgggtttgtcttcaattcaagagatgcttattttgggtttactgtgagccaggcactggggaggcaaaaaagaggaagcaagggtcctgcctactgcagaaaagatcccagagctccagccagttcagaggacgagagttaaactggaaaactgctgatgtcggggagaatctttttattgtcttatgccatgtgcttataatagtttcagccaaaaacaatattgactccactgctaacaataagactattgattacagtcttaaaagtatttgggattaaacatttttaaatcatccatcctatagatattctttatataacaatgtacaatcaacacagtgataaagtcacttgaagtagttcttttctccgtgtgattaggtaccaactggacataggttcatttgtttccatttatttgcaatcgttaaagtctgtttattgttttccttttttgatttcgccatttcttttatgaattatgcaaggaatttatataatttcaaaaccacagaacagggtttagaaaacatgcttccattcctgtgccctccactctatttcttcccgttctataaagggtaagcatctttattatgttgtatcctgtggcggtttctttgtgaaagatgtaagcaatgcatatgtgacatgttagtatttacatgctgctccattcttacacaaaaggtaacactctagaaacaccattctgcagggttttcttcacctaatagaatgttctgcagatcactgtgtagggataagtgctgataataccaacatctatgcgacaccctccctcaccttcgtgggtgctcttgcagtagttgctgggatcttgctccagaggcccctgctgtgcagttttgagcctgagagatggtggccttttctgttttgccttcctgaaagcttccctctctttgcagggtgactctagggctgattctgcctaccctgctggggaataagctgggctctcaaccgggctcccagtgggagagagtctgcccaggaccaacagctctttgaggatcaaacctccctggaattttggctgggtagaaaatcagaagtatcctcaagagagacatcccactccagtacatggggtgggggcttggctggagaggggggattcaattcccagagcattctggataacccctttttgattagaatcctctgaccctttggggttagggtcatggagctcaccattgtgtggaaaattttgtgcgcaagtatattaaaatggaaatgaagttaattaatgaaatgaataaaggctacaaactaagtatgaaaaaagtgcttgaaggaggcaggggaaggcttctaggaggagaaggcagttgatctaggttcgaagtgtggttacgacttgacagagggaaaggcgaagggtagagaggtgtgaccaggtgggcacatgttccagacggacggagccacaggagcgtgaatgtgtctgggggctctgggaagtgccgtgcagttttacatggccacagcatggccacgtggaaggaatggtccaaagaggcagaagtttggtgccaagccgacttgagtttgagtcctggtttgatcagtcaaaccaccagagtctttgagggggcatgggatgattaaacaagtattttgggactatatctcttgtgttggcatgagggacagattagagaattagaggcagaaactaacttttgagggaggcagagaaagtgtcgtcatttccatttttcaggatgggaaactgagtctcagagaccctatgacttgcccaggtcatgtagctgtgaagtggggaagcaggggtcagaagccagggtgcctgcctgctagttagcccagcgttctttcctgtgcctctcccctttcctggagccaccccacaaaacttttgtgcctggcagtcactgttcctgaaggaaaatgcacctggaaggtggtagccaggatcagaaaggcaggtgagtctgggaatggataaagccctgcacccttgcactgcttcttttgggaacacagaggccacgtgtatctacagttgcacttagcatctgaggaagctgggaagccctcactggaagggaagacacggaggcaccttcatctacaccaacaaagtgaaagtaagcaatcactaatgagtgggctgttgaggccaccagcaaagttgtttttagttgaactaaaaatggcaagtagagaccacaattatccctatggttatctcagttccccacatcaatggccagatgcaacctgaacctgtgatagcctcggaaaaacacagcctgatgaagcataaaagaaaaaagtaggcaaggaaggaggagggatgaaggcaagaaataaggtgcaaggttcaggggctttgaagacagacagatttgggtcaaatcccagatttcccacttattggctgtgtttagcttgaacaaattcttagcctttctgagtcttttttccagttgtgaacaacaataatacctaccttaaagggatagtgtacagatatagtatgaaataatatttaacaaaacactatgtaaagaacctagcactgtgtctgatataggctcccaataagcggtagtttgagtgatgatgattattctgccgatgatgggcaaggccaaggcagggtgggtctggctgatgagcgggggtcccatgctgtgccctcgtttcctctgtcctgggcctcatcgtttcccagcctacattcctggccttgctttccatttccaggcttgattttaacctgagacacagtagctcaccttcctccctgtgcctgcctccgaggtgaactcacagaatcctagaagcttagcggtgagagggacctaggcaaagcctgaccctaccctgttatttcataagtggagaaacttagggtccctaagtttctgcaggggggcctgttcaagaggaataatgtgtcttacccagcttcagaaagagtcgattgctgacccatcctgtgcttcagatttccccctgggtggaagtgaagacaggggagggtaggggtcgaggggggatcctactagaatgggcaatcctgaactaacctgcactttgttggcgaggtgtgctttggccagcaggtggcgccatatacttccagatcgcaaaagtgaaactgacctggttgaaaagtagtctgcctctgacggttaagagggcttggctatacccagaaagctcttaataatgcttagaatatttaacagagatatataaaatattgggccttctagtcattgctggggtgataaaatgaccgtgaaagacataaaaaaatttaaattgtgatttaaatatagaagtttatcattctagagagattagactggctcgaagaggaagttgttaccatgtgttagagtctatgagattccatgtgctttacattttcctgacaataaagctgacataataccatgactcccattttacagatgagaagtctgaggcccagagaggttaagatgcatgctcatggtccatacacggctagtcagggcagagctgctatgtatctatatattcaacatttatacagggtttattatgagcagacattattttaagtgctttataagtatctactcatttaatcccagtaacaactgtagatagcagaacaggcacttttgaaagcacaggttagtctgggtcaaaattcatgggctttcccaggaacaggccagctcctgtctcccggaggcctgagtccaaattctttttcagttgctttcatatgaatttggtaactcgcttaccctctctgagttgtgggtttctcattcgtaagctgatgataatgaaaccaaccccatgtggctgttgagaagatcaattagtagaacacatgacacagaattaaccacaaagtcatattccttgttaagggattatttttaccacagacacctaatagatgaattcacataaacgcatgtttgttgcaggattatgtgtaggggtgaaaagcctaagtgtactatgacagggaaatcagttaatgcagtgtgaaatgctacgctattttttttttttttgagatggaatctccctcctgtcggcccaggctggagagcagtgacgcgatctcagctcactgcaacctccacctcccgggttcaagtgattctcctgcctcagcctcctgagtagctgggattacaggcatgcgccaacactcttggctaattttttgcatttttagtagagatggtgtttcaccatgttggtcaggctggtctcaaactcctgacctcgtgatccatccgcctcggtctcccaaagtgctgggattacaggcgtgagccaccgcgcccagcctgctattttaaacaaatatttgggcactgaacaatgtcctacagacacatttagaaaataaaatacactaggagctccatggagctcatattcttggggcagctgacagggcacaccaatgtcagaggggagaattggcacaaggcatccttacctagtgtgaggcaccgaggagagagagcttctctgagaaaaagacatggaagtgaaatgtgaagcaaaaggaagagttagtcaaatgatgggtggaggggagtccaggaagaggaaatgtgtccaaggttcaggatgtgagagcacaacactccatacaccacatctaaaaaataaggaatgattttagacaatgtcctcaaaacatcaaatgaaagaagtgtgtaccagaaattataaacatttttttagctaaaaaaggttttaagtgtgaaatgttttttaaaatgtagaattttgttgcatatatatgtgcatatacgtgtacccaaaaagactcagaagtaaacataaatgcattctttcacttattcactcactctatcattcactcatcaaatgtgttttgagagcctgtggcactggggcctgctgaggcccctgggatagaacaaaaaaaacagtccagggcccaccttcatggactgacttcctagaggagggagacagaaaataagcaatgatgcatggcatacatttaaaataattttaaacaggctgggcgcgctggctcatgcctataatccaagcactttgggaggcccaggtaggaggatcacttgagtcccaggagtttgagaccagcctggcaacatagcgagacttcatctctacaaaaaaaaaaaaaatggaaaaaatagtctggcatggtagcacacacctgtagtcctaccttgagagactgaggtgggcggatcacttgaacccaaaagtttgagaccagcctgggcaacatggtgaaaacccgtctctacaaacagtacaaaaattagccaggcatggtggtgcacacttgcagtaccagctactcaagaggctggggtgggagaatcacctgagtctaggaggtggaggctgcagtgagctgtgatcacaccactgcactccagcctgggtgacagagccagactctatgtcaaaaaaaaaaaaagataaaataaaattcaaatagcgatacaagaaaatacacaagggtgatgacgtggagaacaactcacagggagggtgtttcctcagaccaagtggtgaggggaggcctccctgaggaggagccaccgagggccaagccataggaagaaggacctagtcatgcagacttgggtggagaatattctaggccagtggccttcaatctcggacacacattggcatcatccgagagcctcagaaactactgctgcttgccattcctcaacctttgagtctgccttattggctgtagggggacaatctgggcattgggattgtcacaggaattttcctaagctctcctggtgactctgagaatgctgacccctgagaaccccgggtctagtggaagtgactcacagcatgatctgatcagctttgggtgggagcatactagtcatcaaataacagagactgatgtccaggtctttgaaaacccccagggcaccagaaaatcctgactccagaggtcggcagaggggcccggggattctgttttcataacacgtgctctcaggtgactgtatccactgctaggcccaacagatatcctctgctaggacaaatgagaaacccacaactcagatgaccagtatgaccactatgctcccacccgaagctgac

SEQ ID NO: 6478 - DNA, 458 bp, Homo sapiens
  misc_feature (1)..(458): n=a,t,g or c
ggcagcctggaagaggaacagaagcnggntcggggtggantnagaatactanncttagcttgagacattttgcaataaggaagctatatctagagtgcttatgtgactcacctaaggccactcaacaagtttgtggcagaactggattagaactgcacagaaaacagccaagctgggatttgaacccatgtagtccaactccaaggcctctgcccctaaccactgtgccataccacctcccaataatcaacagcaaaattataggtctaacaatgttttatagacacccctccatttatgtgatgggtttgcatcctgataaacccatcataagttgaaaatatgatcataagttgaaaatatgatcataagtcaaaaatgtatttaatatacctaacctaccaaacatcatagcttagcctagcctgccttaaacatgctcagaacacttacattag

SEQ ID NO: 6479 - DNA, 1890 bp, Homo sapiens
  misc_feature (1)..(1890): n=a,t,g or c
gacccacgcgtccggggaggagaaagtggcgagttccggatccctgcctagcgcggcccaacctttactccagagatcatggctgccgaggatgtggtggcgactggcgccgacccaagcgatctggagagcggcgggctgctgcatgagattttcacgtcgccgctcaacctgctgctgcttggcctctgcatcttcctgctctacaagatcgtgcgcggggaccagccggcggccagcggcgacagcgacgacgacgagccgccccctctgccccgcctcaagcggcgcgacttcacccccgccgagctgcggcgcttcgacggcgtccaggacccgcgcatactcatggccatcaacggcaaggtgttcgatgtgaccaaaggccgcaaattctacgggcccgaggggccgtatggggtctttgctggaagagatgcatccaggggccttgccacattttgcctggataaggaagcactgaaggatgagtacgatgacctttctgacctcactgctgcccagcaggagactctgagtgactgggagtctcagttcactttcaagtatcatcacgtgggcaaactgctgaaggagggggaggagcccactgtgtactcagatgaggaagaaccaaaagatgagagtgcccggaaaaatgattaaagcattcagtggaagtatatctatttttgtattttgcaaaatcatttgtaacagtccactctgtctttaaaacatagtgattacaatatttagaaagttttgagcacttgctataagttttttaattaacatcactagtgacactaataaaattaacttcttagaatgcatgatgtgtttgtgtgtcacaaatccagaaagtgaactgcagtgctgtaatacacatgttaatactgtttttcttctatctgtagttagtacaggatgaatttaaatgtgtttttcctgagagacaaggaagacttgggtatttcccaaaacaggtaaaaatcttaaatgtgcaccaagagcaaaggatcaacttttagtcatgatgttctgtaaagacaacaaatccctttttttttctcaattgacttaactgcatgatttctgttttatctacctctaaagcaaatctgcagtgttccaaagactttggtatggattaagcgctgtccagtaacaaaatgaaatctcaaaacagagctcagctgcaaaaaagcatattttctgtgtttctggactgcactgttgtccttgccctcacatagacactcagacaccctcacaaacacagtagtctatagttaggattaaaataggatctgaacattcaaaagaaagctttggaaaaaaagagctggctggcctaaaaacctaaatatatgatgaagattgtaggactgtcttcccaagccccatgttcatggtggggcaatggttatttggttattttactcaattggttactctcatttgaaatgagggagggacatacagaataggaacaggtgtttgctctcctaagagccttcatgcacacccctgaaccacgaggaaacagtacagtcgctagtcaagtggtttttaaagtaaagtatattcataaggtaacagttattctgttgttataaaactatacccactgcaaaagtagtagtcaagtgtctaggtctttgatattgctcttttggttaacactaagcttaagtagactatacagttgtatgaatttgtaaaagtatatgaacacctagtgagatttcaaacttgtaattgtggttaaatagtcattgtattttcttgtgaactgtgttttatgattttacctcaaatcagaaaacaaaatgatgtgctttggtcagttaataaaaatggttttacccactaaaaaaaaaaaaa

SEQ ID NO: 6480 - DNA, 2148 bp, Homo sapiens
  misc_feature (1)..(2148): n=a,t,g or c
aagacaaacactttccttgactttgagaaataatttaagtcaaagaatctgctctatgctaaccaagagatagagcacagcaaagatctgccagccccaggcctctacctagtggcctggaaattcaagtattcttattggtggaggccatttgtttctgattagaagctgtctaaacctcctactcctcaactcaaaggaaaacacagagcataccatggccaagaaagttgcagtgattggagctggtgtgagtggcctctcctccatcaaatgctgtgtggatgaggacctggagcccacctgctttgagagaagtgatgacattgggggattatggaagtttactgaatcttccaaagatgggatgaccagggtctataagtcattagtgacaaatgtctgtaaggaaatgtcatgttacagtgacttccctttccacgaagattatcctaatttcatgaaccatgaaaaattttgggactatctccaagaatttgctgagcactttgacctcctgaaatacattcagtttaagaccactgtgtgcagcataacgaagcgtccagacttctccgaaactggtcagtgggatgttgtcacagagacagagggcaagcaaaatagagctgtctttgatgctgttatggtttgcactggacatttcctgaatccccatttacctttggaagcctttcctggaattcataagtttaaaggtcagatcctgcatagtcaagagtacaagatcccagaaggctttcagggcaaacgcgtcttggtgattggtcttgggaacactggaggagacattgctgtggaactcagtcgaacggcagctcaggtacttctcagtactagaactggtacctgggttcttgggcgctcttcagattggggctatccttataatatgatggttacaagaagatgctgtagttttattgcacaagttctgccttcacgttttctaaactggattcaagaaaggaagttgaataagagatttaatcatgaggattatggattaagtattaccaaagggaaaaaagcaaaattcattgtgaatgatgagctgccaaactgtatcctctgtggggcaatcactatgaaaaccagcgtgattgaatttacagaaacctctgctgtctttgaagatgggacagtggaagaaaacattgatgttgtgatcttcactacaggatatacattttcttttccattttttgaagaacctcttaaaagcctctgtacaaagaagatatttctatacaagcaagtctttcccttaaacctagagagagcgacattagccatcatcggccttatcggccttaaaggatccatcttatcaggcacagagctccaagcacgatgggtcacaagagtattcaaaggactctgtaagatacctccatcccaaaaattgatgatggaggctactgaaaaggaacagctcattaaaaggggagtgtttaaagacaccagcaaagacaaatttgactacattgcctacatggatgatatcgctgcctgcataggcacaaagcccagcatcccacttctgttcctcaaggatcccagactagcttgggaagttttctttggaccatgtactccttatcagtaccgcctcatgggccctggaaaatgggatggagccagaaatgccatcctgacccagtgggacagaacattgaaacctttaaaaactcgaattgtccctgattcctccaagcctgcctccatgtcacattatttaaaagcctggggggcacctgtcctacttgcctctcttctacttatctgtaaatcttcacttttcttgaaattggtgagagataaactacaggacagaatgtccccttacctagtaagtctttggcgaggatgaacctgattgttacaagggttacaccaagtcatgctaattctatctccaagtatcttgtgcatccctcctctgctctccatcataactgctattagccaaattcaggcccagtcatctcctatctgaattattgtattatcttcttctttgttttcagtaccctctttcttgccaccctttccaatgcatcttctaccctgctacctcagtgattattctaaaataaatatatatgatatggtttaaaaaaaaaa

SEQ ID NO: 6481 - DNA, 391 bp, Homo sapiens; identical to SEQ ID NO: 2803
  misc_feature (1)..(391): n=a,t,g or c

SEQ ID NO: 6482 - DNA, 341 bp, Homo sapiens
  misc_feature (1)..(341): n=a,t,g or c
gaggaacacgcagatgatcagccggtccaccttgtccttgtgctgctccagccactctcgcagcgtggccagcacgatctcggcggccgctcacaggggtagccaaacacgccggtggagatgcaggggaacgccaccgagcggancggtgcatccagcagcaggtccagactgctcaggtagcagctgcggantcggcagcctgactggcgctgggctccccgtaggcgatgggccccactgtgtgaatgacgtacttggccgggagccgatagccgccggtgatcttggccttgccagtcttacagctctgcagggtccggcactcgtcggtaagcagg

SEQ ID NO: 6483 - DNA, 248 bp, Homo sapiens
  misc_feature (1)..(248): n=a,t,g or c
atttaaatgtttttattaaaawwwattaaagaccttcatggcacaacttcttcccagcacagttatggtttagtcataccaattacaatacaattacaaccaataaagcaaggtggggagggccttctggcttcaaacttaaaaaaaagcagaggaagaggggagggaccacttcaaacaaagtttaaaaatactttaaaaaatctttcagagtaattgccaacataacctttcatgttggccattcc

SEQ ID NO: 6484 - DNA, 277 bp, Homo sapiens
  misc_feature (1)..(277): n=a,t,g or c
gcttgttataaattttattagaatagaaaataatacatacagataaccataggatacacacacaggaattgaaagataaattttatacttttcaatatgaaacaaagtgcatatctcatggagatatattgctagaaacaacatgaaacaatagagcaatcatcttgaaaatgaaaagtataggaacatataggaattactaaataataaaaaggtccaacttcattacatgtagcataaaatacaagtattggagaaagtgggaataacaatggtc

SEQ ID NO: 6485 - DNA, 212 bp, Homo sapiens
  misc_feature (1)..(212): n=a,t,g or c
gtccagattcagaaagagtaagtttatcaacatctggcatccctcatactttgtgaagatagatcttctactgcttaattatgagaaatnattttattcaaagaaaggagctcttaatcttttgataaaacaaaataaaggngtagagagctgactagatgtcaagtgcttgctagaaatnattttnaaaatgcttctacacgtaaaatgta

SEQ ID NO: 6486 - DNA, 250 bp, Homo sapiens; identical to SEQ ID NO: 2852
  misc_feature (1)..(250): n=a,t,g or c

SEQ ID NO: 6487 - DNA, 305 bp, Homo sapiens; identical to SEQ ID NO: 5905
  misc_feature (1)..(305): n=a,t,g or c

SEQ ID NO: 6488 - DNA, 354 bp, Homo sapiens
  misc_feature (1)..(354): n=a,t,g or c
atcattgacaatgtttattatcaagaaactttaggttttttaaaagaatgctcgttttagaatacaccaagaggacactctgtgacaggacatatacaaacaaggataattaaaatattaaatactatctaaattaaaagaccataattcaaattgctaattataatatttgtgtcggtagaaataactatagttccccttcatgaaattcacccccacgttctcatgaagactatgacgtctcaccacaatttcagttatttaatttacaataatcaatgctgagttttctgtgctgaagcatgcactgttacagaaagcacaaaatcctatttacagggatttttagttttc

SEQ ID NO: 6489 - DNA, 287 bp, Homo sapiens; identical to SEQ ID NO: 5318
  misc_feature (1)..(287): n=a,t,g or c

SEQ ID NO: 6490 - DNA, 381 bp, Homo sapiens
  misc_feature (1)..(381): n=a,t,g or c
ttttttttttgaaatatacaaacanagnatattttttattctgggcatagttcatgtttttaagaaagtaattagtaattaattatctgacactgggtaagaactggaagattgtgggagacttataaattatataagacttataatttataagacatataaattatgactctatgtaaaatatcagtggggagaaacccctcattttccattgaaaattctgggtaacttttaagtacttnccaaaaatagagacaatttccactgggtttanataatgggatgcgggaaatgnaacaaaagaccatccctaantaactgacggcatttaggggtgggctaataaantaaatgccagttttttgccaactctttcttttt

SEQ ID NO: 6491 - DNA, 484 bp, Homo sapiens
  misc_feature (1)..(484): n=a,t,g or c
tttttttccatgttaggtgcatgatccttcatcaataacatggaaaaaaatcaaaataacattacaccacacacaattggcatatcctattgtgtaagcgagtgcagaggntgaacacatcacaatagtgctgaacacagaatcacaagtaatgtcaaaatgataacttccaaccaaaaaagaaacaatcacaggccaattacttatatacaaatcaaccctaaagacaattatgttccaaataaagatgtccacaaaagaanttcaaaggcaacattatacttatttacaaatggcaactaggccatgtctttaacaggcttattaaaaattactatttcacattttccaaacatacggtngtattttttgtttgtttattttcaaaaggggcgggcttaactttggatggcgggggttttaaattaaaacttggtgggggtttacccggcgggggtttttttggcaccccattcctttgggg

SEQ ID NO: 6492 - DNA, 439 bp, Homo sapiens; identical to SEQ ID NO: 676
  misc_feature (1)..(439): n=a,t,g or c

SEQ ID NO: 6493 - DNA, 389 bp, Homo sapiens
  misc_feature (1)..(389): n=a,t,g or c
cangtattttgcaaaatttccaaggtaaacattagctccacatacagaaataaaagagttctttaagaactagcattgaattcatcacaagaatcatcaaattatgataatggaaaacaaacttgcctatgaccaaagctactgagctgaagtgaagagctgtctttacaaagntccctctcattaagcccactgccctgcgnctgactcaagccatcatcatgtatgtacgntgtataagaaaggacactggnccgggncatggtgggcncgcgcctgntaatcccaggcactttggggagggctgagggcgggncgtatcacgagggtcagggagtttgaggaccagccggggccaacatgggaggaaacccccgtgtcttacttaa

SEQ ID NO: 6494 - DNA, 409 bp, Homo sapiens
  misc_feature (1)..(409): n=a,t,g or c
ntctcttcagaagctttattctccctgggaggggcacacctcacccagccaagggngcnttctgactggacagagggcgtccaagatgcagacatggtgtgcaggcaggagggcttccactagccccccaggtgggaggtgctgtgcccangggctcaagagggagggggccccagccacgagggaggggcagggactttcttctcacaaagacctttcttcagtattcgaaggtcactgtcttgacccgcaggtactcgttcagagccgcctctcctagatctttgccaaatccagactgtttgaatcctccgaaggagncggccacgtcggtcttgttgtacgtnttgacaaacacagtgcctgcctgggagcttgtcactgacatacagggccttgttgaagtccc

SEQ ID NO: 6495 - DNA, 414 bp, Homo sapiens
  misc_feature (1)..(414): n=a,t,g or c
aatanaggaataataaattgatttaataatttgaaagaactgtaaggtttaggttttgttcttatttttagtgcgactgagattggagtctgtttgtagacatatctgaaaaaagtgaagggggagatggaagatggtaaatgccaaggaaaagatggaaggataaatcagtgtaataaaaaggagcacttctttttcgccaacagaagtaaaggtaaaggttaagtgtctgagttaacgaatggattgttgacctctggggagggtgctcccatcagctcagctttgtgacgacctaaggaatatcccttccacacctttcctgatccaatcgttctgggctgcataaaaccacctaaatcaatcaactgttacacttcccttagtgctaggggcatattcctnataactccc

SEQ ID NO: 6496 - DNA, 284 bp, Homo sapiens
  misc_feature (1)..(284): n=a,t,g or c
aagacagagtggactgttacaaatgattttgcaaaatacaaaaatagatatacttccactgaatgctttaatcatttttccgggcactctcatcttttggttcttcctcatctgagtacacagtgggctcctccccctccttcagcagtttgcccacgtgatgatacttgaaagtgaactgagactcccagtcactcagagtctcctgctgggcgcagtgaggtcagaaaggtcatcgtactcatccttcagtgcttccttatccggggaaaatgtgggcaagg

SEQ ID NO: 6497 - DNA, 440 bp, Homo sapiens
  misc_feature (1)..(440): n=a,t,g or c
aagtcttgttccccatttatttttttgttgtgattcagaaatacaaggtatgaaaattagattacaattctgccacaaaagcttctaaagtagcaaacacaactttgtgtatcaaaatagccatgtgcgcttttatcagttaaaaagtctttagagttatcacatcaagcaagtgtaaaatataatagctactatctccccttcaaaattgcaaatccacagttactgcactgaagtataatccgaagagcaagatttagtccagaatatggaaggttctggttggcaggtactttttaaagctgacttactaagaactaaaagaaatgagaaatatacaaagcatcttatgtcaaagagtatgaatatttaaaagtggcctcaagtgagtaatacatgtttaaattagaaccngatgtaattaaatggttatggaattt

SEQ ID NO: 6498 - DNA, 451 bp, Homo sapiens; identical to SEQ ID NO: 5085
  misc_feature (1)..(451): n=a,t,g or c

SEQ ID NO: 6499 - DNA, 301 bp, Homo sapiens
  misc_feature (1)..(301): n=a,t,g or c
ttttgaattcataatcatttattgtaaatcactcacagtttacacattaccagtggcaaaataacactgttaaacacctactggatgaagaacttcattgtgactatttccaattgccatcatatctttttctaaaatttaaaatttaacttttaaatcctacatcttttctgaaaatatctatcttcaaagtgctccaatactaacactataagccctttcttttgctctaacatctaacacaaagggcacactgtcccattaattccacatgcactttacaaagcaacttcacacacaa

SEQ ID NO: 6500 - DNA, 465 bp, Homo sapiens; identical to SEQ ID NO: 455
  misc_feature (1)..(465): n=a,t,g or c

SEQ ID NO: 6501 - DNA, 444 bp, Homo sapiens
  misc_feature (1)..(444): n=a,t,g or c
aggctgatcatactagagtatatttattaaatttcaccattatgatcactttgttataactaaattaaccctgacataaactttgacattttanaaacagagaacatactgatttttcaactattttacttacatgtgttttttaattctcatgcagtgctcataattaggagatactacatattcaccctcacattatgcttattaagaaccaagctcagagggtagaaaagtgccaacttcattttccataaacttcccatacatatattaagccactgttcttctaattatatacttatggtacattcttctgtaaaatgtataactgtagtcacataaccattgttangacaaggcggcaacatcatttcagattacaacaaatgagaccaaaagttgaagagaccacagcatataaaagtcatgagaacaccacacact

SEQ ID NO: 6502 - DNA, 473 bp, Homo sapiens; identical to SEQ ID NO: 4390
  misc_feature (1)..(473): n=a,t,g or c

SEQ ID NO: 6503 - DNA, 544 bp, Homo sapiens
  misc_feature (1)..(544): n=a,t,g or c
ccagacattatggccaagcatgccatacaaaactgtgtttatcgtgaaacaatctgagttaggaaactaggattgttgccaccaccatttatttatctagttcataactaaggatagaacactatagcagtgctagagatgcaaagacgtccctgcccttaaggggttacaatcttactggagaatataacaggcacataagaagctggactacaaggaagcatgagctaacaaatgccagacttcggaaggcagcgtagtttgagaacatgggattcagagtcacaaaacccacatcctagtcccaacccagtatatcagttaacctctctgggttttttcccagctacaacattaaattagtaagactggagaggctgtctgcatgtttccatcatcattcagatcaaaagctgagatgagctttagggaggaggctgcacctgagcgggacactgaaggaaggcaaaggaggtgtttcagacaaggcaaagcagtactgaggtagctgtaagcttggagtttggatgggagcgacagccag

SEQ ID NO: 6504 - DNA, 449 bp, Homo sapiens
  misc_feature (1)..(449): n=a,t,g or c
aaacttgttttaaaaaaggtttatttgttacaaaaagttaaatactaaagctaaaaacatataaattcaggtcaggctatattaaaatacacacatacccttctttgcaaaattattaaaggttgaattaaacagatgctttaaataaaataaagtactctttgaggacatttttgtcagattaactataacagtgtagtgtagtttttaaaattgcagttgaaaagtttagctgtcttggaagtcaaatttatccaattgttcagacttctgttactacttaatatgaagccaccatgctggcttggacagaattaatttcattcatgttatggagaattctatattacaaatctggtcccctataatatgaacagtgagcagtcagaaatatacaaaggggttaaatagggtaaagactttggccaagaaaggaaaggccttagttc

SEQ ID NO: 6505 - DNA, 429 bp, Homo sapiens
  misc_feature (1)..(429): n=a,t,g or c
ggagagtctcacttcatcacccaggttggaatgcagtggtgcaatcttggctcactgcaacctccatctcccaagttcaagcaattctcctgacttagcctcccaagtagctgggactacaggcacgtgccaccacgcctggctaatttttgtattttttcgtagagacggggtttcaccgtgttcgccaaggtggtcttgaactccaggcctcaagtgatctgcccacctcggcctctcaaagtgctgggattacaggcatgagcaccacacctggcctggattagtaatttcggatttccaaattcaggtcaagaagtggaatttattatgtggttcttgtgaaaaaaatataaatgtggccttttaaatatatttagtcttttttttanacaaagggctactcaaancattaccttcctgcccccc

SEQ ID NO: 6506 - DNA, 512 bp, Homo sapiens
  misc_feature (1)..(512): n=a,t,g or c
ttttttttggtgccaaaactttactggaggtcacatgggactaggggccttctgtccctgccagcgcctccattcccaggcgatgcccgctgcctgcccacctaccctccggccccacatgaacaagctgtgtccccaccgaggtcacagctctgccctctggggatgggcgagggaggggccacagagccggagaggctcccgcaccgtcactcctgccgggtctccaagcagtccagcaccagtgcagcctgggtcttggcttcctgcaggaggctggtccttaaatgcctcgtctgtgatgtccctcaggttgatgaagcacgttgaaatatgcgccaaacacacccatntccagggctttggccgccacctggaggtctgaccggnaggccaggnttccaaaccgggcaagttcctgaagggccggcaaaaggaaggcaacggttttcgcaaagtttngggaacaagaaaattgccggcttaaaacctcctgtaggggccnccttgcc

SEQ ID NO: 6507 - DNA, 395 bp, Homo sapiens; identical to SEQ ID NO: 4914
  misc_feature (1)..(395): n=a,t,g or c

SEQ ID NO: 6508 - DNA, 417 bp, Homo sapiens; identical to SEQ ID NO: 465
  misc_feature (1)..(417): n=a,t,g or c

SEQ ID NO: 6509 - DNA, 268 bp, Homo sapiens
  misc_feature (1)..(268): n=a,t,g or c
tttttcaaataaatatcctttattaaagaaaaagaggaatattgttaaaagcaccaaaactgtaggttgttacattgcatgtacaacaagagaaaggtgattgcaatacttggtgtacaagtacttaactctgaagtcatgagtgtaaaaaacatgaaatacaaagcaatacaattacaatgcagaaaagctgcactaaagagcaaaaggcaacagtcaaaacgattactggagatttcatggtattgctataaatgcttgcttagtt

SEQ ID NO: 6510 - DNA, 513 bp, Homo sapiens
  misc_feature (1)..(513): n=a,t,g or c
agtgcagaaagtatctgtattagaattctagagtaagtcaagagctcacattcattaaaataatgacacaactccacnngggtggggagaacagcagtaaagcaaccacatactatactattagactggcaacattgagactgaaaatatccatngaggagaatactgacatcttagnggggnaggcatttccttttaacccggtaattccagtagtaaggatcatacaaatgtaccgctaggaangaggtaacgtatatgatcatcaatgggagaacagtaaaggtgttactgtggaattcccgacaggctttcacttggagggggaatatttgaacacaagtttaaacaacccagggtaagcacacaatgcactatgcnctgaaaggtatacgtttccgccggggtgtttaaacatttccaagttaaaaggntacaccttacccaaagtttcngaaaacctggnttgcaatccgagttccggggggggggttttnggtttttttttaaagc

SEQ ID NO: 6511 - DNA, 400 bp, Homo sapiens; identical to SEQ ID NO: 5322
  misc_feature (1)..(400): n=a,t,g or c

SEQ ID NO: 6512 - DNA, 248 bp, Homo sapiens
  misc_feature (1)..(248): n=a,t,g or c
tttttttaaccatttctttgtatttttattgatttttcttttttaatttctgcccagttacaacaacgaaatgggaaaccacaattaaaattcacaaaccatggcatgaaaaacaacacgcaccccatcaggaattacaccaaaccccttttcctttttattcattcaaaagagagtccaatacacaagtgtcaaatatgagcactgtcattttttttttcttagaagggggaaaaacatttattttg

SEQ ID NO: 6513 - DNA, 435 bp, Homo sapiens
  misc_feature (1)..(435): n=a,t,g or c
ttttcggataaggctgtgctttattacatgcataattacaaatctgtgctaagtgaaaatgtataaagcaatggcgacctgggtttaagccacacagagaaagggctggacaatccattaacccttctgccaatgtccattccattgcttttaacatgattgtttccatttcttacaatttgcatagcacttacttgtcaacttgctttgaattcattgtctcagtttatcctcacaacaaccctgtgaggtaggtagggcaattaacactatccccattttgcagatgggaacactgaggcacagagcggttaagatctcgaggctagttagtagaagcatagggaatagaaatcaggtctcctaactccccagtccacatcttcctttttagactangttgttccgcatgactagggagtagaataaagcgag

SEQ ID NO: 6514 - DNA, 453 bp, Homo sapiens; identical to SEQ ID NO: 741
  misc_feature (1)..(453): n=a,t,g or c

SEQ ID NO: 6515 - DNA, 457 bp, Homo sapiens
  misc_feature (1)..(457): n=a,t,g or c
ttttttttcggaatgcaacagaacttttaatcccataaaagactcaatatatttggcaccctcattttatagtactcctttttggtacagaatcattttgccaaaatactcctgtgatacagatgcacatgataaactgtaaaatggaatttcacccattgaagagccccaaaagaacaatatggtagtgcagcatgaactaacatgcaatttctaattttcaatatccccaaattgcaaaatactaatagctaatatatatactatatgccaagtattaagtactttgtaatattatcataatctgttataaccgcactatgaggaaagtagaatagtacaattatctcactttgcagatgaagaagctgaggtatagagatcaatttacacaaaatcatataggctgttaggctctcaagtctagctcttaagagttgataaatgtggagccttt

SEQ ID NO: 6516 - DNA, 262 bp, Homo sapiens
  misc_feature (1)..(262): n=a,t,g or c
ttattgaaaattttattaaaatccttcatttatcttccagatagtagattctattaaccaagttgcataaagagttctgattcccagaggtaagaactgagcctggctttctagttacatgtttactggtaaccccgtctttccctataacacttaagcatatttaaagaatataccctcccctgcctccagccagggattgtaagctcctcaagagcatggctgtgtcttttaacatcaagggctccagggtgaggaagag

SEQ ID NO: 6517 - DNA, 435 bp, Homo sapiens
  misc_feature (1)..(435): n=a,t,g or c
ttttttttaccgcaatcaacaagtatttattgataaaaacaaagccatttcaggtgtgacaacagtaacatagttggcaaaaagataaatgggaacatggctctcagataagtcatagcaggcaagggaaggttagaagacagtaggaagantaacatacatatgcataacactttacaaatcatgccacatatatttagcttctttgatcttcacaaaaaccttctgaggtgttattatttcccgttttttaggggaaaaaacggctttaaagatttcaggccngggggcagggggtcaggcctctaattccngcactttngggangcccangtggggtccccctnaccgtccgggggttcttggncccgncttggcccacctngggggaanccccccttttcccctttnaaattcccaaantttgcctggggg

SEQ ID NO: 6518 - DNA, 424 bp, Homo sapiens; identical to SEQ ID NO: 755
  misc_feature (1)..(424): n=a,t,g or c

SEQ ID NO: 6519 - DNA, 336 bp, Homo sapiens
  misc_feature (1)..(336): n=a,t,g or c
tttttacaaaccattcattttatttcctgtattgggtttatacaaacttgcaagatacaaatgcagaactcactgggattcttcagtacctaaatctaaaaagaatgctgctgaaagggggaagcaaactctcacctgtttcagtcaggccatccctcctcctggggaggggctcattggctagaaagatgctaaggggatgctacagctgtttgtcccctgacagaggattccatctatctaaccttcacccttcttctaaggccacttttatgctaaataaagacactgaggtaataaatttccttggtacagtttattgtctaatactaggca

SEQ ID NO: 6520 - DNA, 342 bp, Homo sapiens
  misc_feature (1)..(342): n=a,t,g or c
tttttttttttgacacaagaacaagaccttttaaaggaacttctctttagtaacatcttcttgtccaatctcaaagttattttgcacagagtaacagaaacaatttaaatgcctaaaagaactagaggaaaaactggagggaaaaagatacatctgcaggttgaagtcttgagccttgtgaaagatgacccaggagccacctcccttccttcgccttccaatgtccacagctggatcaatcagagtcccagaantgggcacaggtgtctttcctgctctgagggtacattctagtgtttcatgaaggggaaccgttctgcaggatgcgtcagggccacgtag

SEQ ID NO: 6521 - DNA, 266 bp, Homo sapiens; identical to SEQ ID NO: 757
  misc_feature (1)..(266): n=a,t,g or c

SEQ ID NO: 6522 - DNA, 317 bp, Homo sapiens
  misc_feature (1)..(317): n=a,t,g or c
ttttttttttttgatttctcaaagctattatttattctgtacaaggttccactgtacattagacattcttctactcttgcttacacagtaaacaagtgtacacttgcccttggntncaggttcacaggtcttctctggagaagggtgtcaggccagtaaaactcagggtgtctttctctgatgcctcctcctaggagcctgggaatgtgccaggctccacggggcacaagccgggcccagctgtgtgggtgaacagctttactctccagggacagcacagagttttatccaactntgtagggncaaaattgagccca

SEQ ID NO: 6523 - DNA, 414 bp, Homo sapiens
  misc_feature (1)..(414): n=a,t,g or c
ttttttttttccattttaaattattttattgtatattaaaaaaccaaataaagcaataactttaaagacctcacacacacacagtataaacacctgggtaaggttttnttcgtgtccatgttgacaccggaactaccgttaaagtgcaagttttgttttgtgttcctttgtgcagtttcactcacatgtaaacaagtcacttggctatgatttgacccacgcccccccgnttagtttcgggagggcagaggctctaccggctgtcacagcaacccggantcacagncaagntaatgccccgtgggtcctgaccctgcaagcggggcatgacggtttcttgangcctagcagaggntggttaactttcacatncctcccccaccccgtggttcactnttaggtttttgagaagtt

SEQ ID NO: 6524 - DNA, 446 bp, Homo sapiens
  misc_feature (1)..(446): n=a,t,g or c
aatgtgaatatnncatatttaatgtagttctggtgatggctacagtcagtagatctaccagcaatttgtccctttttttgtttcagattttaaggcagaaactcaatctcagcagctaatttcatccaattttcttcagaaacattctccaatttagttgagtacgcaagaaaagtgtgtgaacattcactcctgtcctccccacatacatatataggacatacaataaggaaacatacatacatatataccctaggattgtcaatgtatggctgctggaaatgccnggaagggttacttttcactttaaaaataaaatttggtgggattattctgcaggttgggggttgggcccctggccaatttttataaatatgggttgngggggccggccaccagggttttacncggggggctgtcctgggggggttnccccgtnggggttt

SEQ ID NO: 6525 - DNA, 349 bp, Homo sapiens
  misc_feature (1)..(349): n=a,t,g or c
tttatgatttgatttttaataatggctgcatttaataaccagctgtcaaaatgaaaattttacaatcagcttttctaagttggtatgagccagcttagcataccactacattagtataccaaagagagcaagattcaacttttccttttggtgtttgagaatatagataagctattgatgtctgcagcaggaatttaagagactttggactattaagtgaaaagcacgaaaatcctttgagcatgccagggaataacttgcagcttgttttgcttaaattgaaatatatctacatatagcaatgatcatggggcttttacaatttcaacctatttttacaaacttcaat

SEQ ID NO: 6526 - DNA, 333 bp, Homo sapiens
  misc_feature (1)..(333): n=a,t,g or c
aaatttaatattgaaaaagtgatctggaagccctgtgaatttttaccctacacattttggaggacatcacatgggttaaagaaaacaccacaaaatctcatttgttcagataatcatttgaatgtttacatacatttttggttatttatttataactaatttaatttacatttcctcatattaacatatcctcttatttagtatgtaatcaaattatgtcagtgagaaaaatcctcatagtacccttgagttgctgattctngagaaaacactnaaaccatggaccatgtaccaaaagaggcattttgaattaaaccagccatgtgccatttt

SEQ ID NO: 6527 - DNA, 235 bp, Homo sapiens
  misc_feature (1)..(235): n=a,t,g or c
ttttcagtatcttaaataaactgtttattcagaaggaacaattaaagaaagcaactatgatatggattacaaaaacaaacaagcatagatcctctccaggctccagggtgagacggccccacgctgcaaagactgccagccctgggggatcgcatcagtgggctagcatgtgtgtgtgagcgccgacacgtgcnacacacaagcacacacacgcacacccgccacccacagggtt

SEQ ID NO: 6528 - DNA, 368 bp, Homo sapiens
  misc_feature (1)..(368): n=a,t,g or c
ttgtcaatgtaatttatataacnttttatttttatataatttcacatgtacagaaaaatatccatatacctttacccaaatagctaccaccaagaaatctctgttgtaacatttcaatcgccattccctctgaaataataacaaagcactttatttgagtattctgtattccccaaagctaactgtgaaagacctacatcacctcaaaaccttccatttggttccatagatcctgccatgtcacattcttgtaaccagctgcaggggcatcttgntataactggntcatgtcctgctaaagntgaggngggtgaagggctaaaaancacagtcctgggncagattcccggggggaacccggntacagg

SEQ ID NO: 6529 - DNA, 448 bp, Homo sapiens
  misc_feature (1)..(448): n=a,t,g or c
agcaggancaagtttaataaacgtttattgagcagtagaatacaagtgagtnccngganccngatcaccaagtcctgtacaactgaggtaattatttcacaatgatgggtggctcagtgagattctgattgcatgcgctgcatgacaaattatctactcagagtatgcctgacacgccggagggctngagggggaacacactgaaagcagtaccagggagcagtgcatctcacaganccatttnttcatgccatgaagtaaacggtacttatacaagtgtacagtgacgttccacgntccccatctaacacggnttgctggaantttacaggcagactgacgttttctttcacatgtactccaagtaaatctggttagtgatgaccngggggcaggcgctgaagcttttcaaagccttacttcttttatcagcagcccggntttttat

SEQ ID NO: 6530 - DNA, 287 bp, Homo sapiens
  misc_feature (1)..(287): n=a,t,g or c
taacatttattgcttcttttggggttagcaagttgtaagcctcattagatgcatacactaagaaatggaattgattagactcgaccgtaggaatggatcaaactatgtactcttcttgttccaagtttcctccaaaagtagtagttattttgtttttcttcatccttgtacagatacatttagtagagcttaccacatagccttcccctaacaaattcccaaagacgtcccacagcccccttatggtaatgagggtccaatcaatgatcaattaggccatgctaggt

SEQ ID NO: 6531 - DNA, 483 bp, Homo sapiens
  misc_feature (1)..(483): n=a,t,g or c
ttttttttttttagattaagttatgaaatttatttatattttaccttttaaaagccagaacataacaaatctcactttctggaaagtcatcttattagaaatacaagaagtgcacttaatacaaggaagtaagtttctcggtgccaccagtgaggtggacatacactcacatcagtccctcaaacgaaggtttcgccagatttccctccagacttctgagatgatctgaattcaggaaggtctgagtgaacttcttccagaaattacagtgaacaagctgaccttaacttttgggtcctcccgagaaatactaatgaaaaaactatttttttccagtgggccctgtgtttgctgggcttctcggcatctggcagctcttcaccggcaggcgcggacccccacagcagcagtgtacaagcgcgaggtagcacttgcagccccatcagagacatatgacatcaaaaaaccaaccttaaacccatt

SEQ ID NO: 6532 - DNA, 329 bp, Homo sapiens
  misc_feature (1)..(329): n=a,t,g or c
gccacctctgggcctctctttattgagggcactgggccaggtcttccttcagggcccacagcgcccataaaacccaagggagaatagaagagaccccctgatacacgcacactcgaggggcgcctcccatccgctcccacaacacacaggacagaagcccctctggncnggcagggaaggccagcctcaatccttcttgctcccgtgccgctgactgtgaaacttgtggtgcacaaccctcagggtggtgaagaaattgccgaggaaaaggaggaggaagggaaagccnacataagcacctgccggagaaataggggtgaagggctgga

SEQ ID NO: 6533 - DNA, 211 bp, Homo sapiens
  misc_feature (1)..(211): n=a,t,g or c
caggacagattggcctttatactaaanttccacaatatacctggtattagtacagcctgaatccggggctggtcacagaaggaaaaaggttgtagtccctgaaaacagagtgttacaaggacatacacactacagatgtctccacggtgggatctngccacacactcggctgggcaaaatgagggcctggctggcaggtgctaatatattt

SEQ ID NO: 6534 - DNA, 398 bp, Homo sapiens; identical to SEQ ID NO: 797
  misc_feature (1)..(398): n=a,t,g or c

SEQ ID NO: 6535 - DNA, 436 bp, Homo sapiens; identical to SEQ ID NO: 4434
  misc_feature (1)..(436): n=a,t,g or c

SEQ ID NO: 6536 - DNA, 444 bp, Homo sapiens
  misc_feature (1)..(444): n=a,t,g or c
tcactgtgatgaaatcactttaatgtccttgccaaggaaatgcccaagacactggcaggtgggcaagtaagtgtccagatgggaccccgcagctctgtctccactcagcagtgtccgcacgccccaggccagcaggcgncccctcctcgggcaacactggtcttcctgagggcagcccgtgctggggtcccacgcttcgtccatagtgcttgtggggtctctagaactcagtcatcttcttgtgggtgtctgccttcctctgctcctgctgcaggccggcttcctgagcccggagctgccccagctggcgctgggctcctgccagcttctcctgcagctgggctgacgccacgctatgccggccagcgttgcgngcgagactcctggatgctcctgatgtcccgctgggttcgctcgatcttctcctcagtctggaagagccgc

SEQ ID NO: 6537 - DNA, 598 bp, Homo sapiens; identical to SEQ ID NO: 5711
  misc_feature (1)..(598): n=a,t,g or c

SEQ ID NO: 6538 - DNA, 448 bp, Homo sapiens
  misc_feature (1)..(448): n=a,t,g or c
ttattgattaattgagtgattttagtcaagtgaatattgatacatggctcgaaaaagcatgaaaataaaatgaacacgtacgggaattactattaacataagcgataacatcaaaacatctggtaaaatgcagttaaaaaaacaacacaaatgaaatcggaatgtaaaacattttcacagtattcaaagcttttgtaagagacttaggatctaaaagaggagtactacaggaagaaactagaggaaacgggaatttcatccatgtcctgtgtatctgctggcaacaggtcagaacggccagtatgttattccctgcaggctgcctagggtgctctcctcaaacagatcacctgagcctcctgcatctatgaagttatgacacagcaaccagttactcagagtctgatgagaaaaacagattttaggtttgggaaatgggattactgta

SEQ ID NO: 6539 - DNA, 416 bp, Homo sapiens
  misc_feature (1)..(416): n=a,t,g or c
cctataacatgattgccttttatttattatgcaggttgttgatttacatagggagttggagatgctaaccaagcatggagttttcacatggtctatttctgctgagttcagggacttggagacagcctttaacttctggcaaaaagacaatttcacaaaggtgtttaaaaccatcctttggtttttgatcctgagtcagagacggacatgtgcttatgaaagaaggtagagtttcaacccttaggtaaccttaaaagagcaggaactatgttgtgtgtaagtcatgtgcagtatacaaacttgatattaaatgacaaattggaacaatctttctctaggaatgcctctctttccatagaggcatcacagtgaagtctcttaaagccttgatctaggttgtgttacagattggggct

SEQ ID NO: 6540 - DNA, 415 bp, Homo sapiens
  misc_feature (1)..(415): n=a,t,g or c
gctgattacaatttattatttcttttcatccaccatccactcctcaaattatacgccctgacctgcccaacactgtcttatgttcaggattggcatcacagaggtacacagttccactggttccagcttctgggaatcgggaacatcgttgcagtgtgtaactcattttttgcatagcttcattgctgtagtctacatgagaatagacaggaaacccaagtttgcccaatttctgggcgtgggaatagatgacatacgtcacaaggccatggagccggttattccngaacggtgcctgccattctcatctctccagtctggtccattagatcccagcacacaggggtcccctcaggccccaggagacagcaggtgggaaaggtctgaatgcagcgctcaatgaatctctggctcc

SEQ ID NO: 6541 - DNA, 418 bp, Homo sapiens
  misc_feature (1)..(418): n=a,t,g or c
gacatgaaacagtgttatagtttataaggttttaaaaggaggaaataaaataggatatatggttttattttcattaaaaaaaaatatatatctgtttaaaggcacagaaaaaagttcagaggtatacttacaccaaggcattaaaagtggttatttggggcatcagaattttggttgatttaaatttcttttctgcttattttgtattttcatatgacatgaggaatgttaatatgcataacatgtactcctcacaaaagagtagtaaagctaaaaagagaaagcagtgccaggtagacaaaatgtctctttcaacactggctgaccctggatattatactggtaacaagatgatagactctgtgttctaccatgttcctgctgtgacagctgcatggcataaagagacagagatgct

SEQ ID NO: 6542 - DNA, 410 bp, Homo sapiens
  misc_feature (1)..(410): n=a,t,g or c
tcaaaagtctaaaagtttattgccagaatagcaaacttcataaagacaccttaaagtacatcgaatatgacaagcaaaataaacagaaaactttgaccaaagaaaagattgccgctgtcatgcacagtcaaattaataccaaaccaaacaagtacatcgaagagtatatgggttatacaatccacactctgaaactaaaggagactcattccaaaatgcttggttttgggttgggggtttgagaggggggctggtgctgggagggtaattttctcctaatacagaatatggaaatatttagatgagaagcagaatgactaaaatatcagtgatccatttaatttttatctccaagaatagaaaactgtattataggcttccaaaattaaagaattgatccaaaaatcgaa

SEQ ID NO: 6543 - DNA, 231 bp, Homo sapiens
  misc_feature (1)..(231): n=a,t,g or c
agtttgtatgatttatttatgttaaaaaatccacacatgatgctggggtttcaatggctttgtttaagtgatagtttttcctttttagtgaaagttggagcgatgataaacagctccagctgtaaaaatgaaaggcggaggtgaagctgaggtgattattacagaaaaatgctgagtggggaggggtatttggcccttccatcctctaaaatgaaaattaccctctgccac

SEQ ID NO: 6544 - DNA, 307 bp, Homo sapiens
  misc_feature (1)..(307): n=a,t,g or c
gacacttccttaaatacatgtttattttacttcaatatcgctcagggttgtatgtatttgaatacttcagtactattttgaacattctaaatatgaaataccataaagcgttcaaatttatcaaacagtggtacaatatggttactaaacttgcaacttaatttacaatgacgttcaattttncctcttcaaataaaatcactgactttggtccatttgatgagaaactaggacatatgccatgacagcatacttctagcactctatgtaataagcaaaagataatttagctaatatagacaggtta

SEQ ID NO: 6545 - DNA, 325 bp, Homo sapiens
  misc_feature (1)..(325): n=a,t,g or c
caccttaggcagctttttattttgcatcctttttttcaactttgtcttctattagctgtgcaagaaatacatgtctgctaaagttacacgatcttcgcacaacagcaacctacacattagtctacaaaggggaacaaacccaanttcctcagaagtctgagtccactgttgccttctttctggccatctggcagttacaatatagcacagaatgactatgcaagttaaatattcatcttagacatggacatttgctttgggactcctaaagtggagtcaaatttgatctctacagaaactctacaatgtagcagagcactgtgcg

SEQ ID NO: 6546 - DNA, 507 bp, Homo sapiens
  misc_feature (1)..(507): n=a,t,g or c
ccaagccaaactatatctagctttattaaagttactttccataaacaatcagggtatttcaggcaggacatgggcagataatcgttaacggtgtacaacaactttcaaactcccttcttcaatggactagcaaaatcggaaagccactataaaacccagtgaggtcttcatnttatgccctgaacagggagagtttagagtgagggttgacatttcaactttagcatattgtttaacagcttttcatgaactgaccctgacttccaggaaatgaaataaaaatggcagaatttatctgaaaatctgaaaatccacaatctaagaaatnggaaactctactctttttcggggggctccatctcantggcaccactgggaaattnttggttngcctggacacactggtaaccaattactgggagggtcaggggcccancaggagttttgggttttaangggagttaaagtcnaatgtttggaaggatgaccangggtaaaagagggacc

SEQ ID NO: 6547 - DNA, 320 bp, Homo sapiens; identical to SEQ ID NO: 2912
  misc_feature (1)..(320): n=a,t,g or c

SEQ ID NO: 6548 - DNA, 390 bp, Homo sapiens
  misc_feature (1)..(390): n=a,t,g or c
gagacttgtggttttatttatttctgacaatgttacttagctcttctttccatgtgttgggttaaggcagaacgaaatacttctactgcaaaatcaacttctggtttagtgatgcacattgagggcgcaatggaaatgtctgagaaaaaatgctgcctctgccaacgaggagtcccatgtgcttgcagtcctcatggatctgatttacttcttcacggggaagaggccgacagcttatcttatcctgcaccatttctatgcctatcatgaggcctttgcctcgggacggtctccaacaatttcaaattcatcccggcagcttagcaaacttttagtaaacatgtaaggtcccaaacttccttggactggtttttcccggtaagaattttc

SEQ ID NO: 6549 - DNA, 465 bp, Homo sapiens; identical to SEQ ID NO: 2915
  misc_feature (1)..(465): n=a,t,g or c

SEQ ID NO: 6550 - DNA, 456 bp, Homo sapiens
  misc_feature (1)..(456): n=a,t,g or c
cgatgagcaaactgaactttaatttgcttacctgaaaggcttgctcttcattattggcataggccacagctatttacacagaatcattgtacaggatttacagcaagatgctacacatagcatcattctggataagcgacaaaggagtaagaacagactggggaataaagctctgaaatcaaagtgtaagcagaaatctgaaggtaggtgtacaaggaaggataagggccaaatgatgagcgaggttggtgaggtagacataagggaggaagaggaaacatccaacaacttgtggtgcagagatataagggaagagtccactggcacatagtcttaaaaattatgtttggagtttgaaggaggaaaaatctgccataagccacctctgtgagaaaaaagaaggcagttagaaccttacaggccaaaccttatacctcccctatcaaaaagtaattc

SEQ ID NO: 6551 - DNA, 444 bp, Homo sapiens; identical to SEQ ID NO: 3445
  misc_feature (1)..(444): n=a,t,g or c

SEQ ID NO: 6552 - DNA, 429 bp, Homo sapiens
  misc_feature (1)..(429): n=a,t,g or c
aacaagggggcagtcatttaatgcagaaatccagttaacataaagagacagaggttgaacaacaggtcttcaaacaatactgcatagtgtcacgagttagctcttaagcacgtttgatctgtttatcttatgatttcgattccagtacaaagacagagaagagacttaaaaaaaaaaaaacaataaggcaacagaagaagaatcttcctgtgacaaggaacgtccacaaataatgcacaaatatttggtgctgacacaataagacaccatcaggacaagttctgaagatgctgcattaaaatttaacaagcatgatacaatgacaagaaaattatactcgctttgttacgaatccttttggcaagtagaaatgactctcgggtaattgttacatacaaactttctgaaataaatggaaatcatacaaat

SEQ ID NO: 6553 - DNA, 306 bp, Homo sapiens
  misc_feature (1)..(306): n=a,t,g or c
acaaatatttattaatttattttaacctaaattacatgttaacataaatatttttatgaactatatttccccaaacaaaaacagttagcaaagtggtattgttttacattttgcattttaacaggagacaggtgggttcttatatttgcttccgttgtgatactgcatgtcatgtagcctctggaaaactctactgtacacctctattttttcagggctttacgtgctaggtgtggtttcttcctctgcatcgaaccagcgacctgggtgcctccccacccaagacggacctccacatcngggaac

SEQ ID NO: 6554 - DNA, 470 bp, Homo sapiens
  misc_feature (1)..(470): n=a,t,g or c
ttgactatccacatttctttaatgtaagtcaaagcccatcacaatgcatcctgttacaatggaaatcttatttttggaagtccacttaattattttgagcaacattatatacaacccaacagatacaattaattgacaacttgttgaaatgttagagctaaaccacaaagagtaactgagtaatgttgacaaccccaatatttattctcatactgtgctcaacattagatgatctataaaattcaactggcaaagggagatcaaagaattgtgcttcatcttgagcttgaattggatgacaaggagattaggaaatcctaagtggaaaantattcaaatcattgtgctttccatatatttttcttaccacctatttccagttataaaccttacatctgtgcctctggcataccatttaagtacaatactaaacattctttaaaatcntttttcnactaactnttaaaagg

SEQ ID NO: 6555 - DNA, 469 bp, Homo sapiens
  misc_feature (1)..(469): n=a,t,g or c
ttatggcttataggagcttataactttattcagatagcatcaatcagggatgaccagaacacattaggaccccagattattcaaaaactttaacgaattttaaggggaagaattttatcttttcccttaaaatgcagtcatagaaattagaggatgactcactgccacagtgtctaaaagcatttgctagcaaagaggcaggacactaatttgtaaactgctcaactgttctgactggaagggaggcctggagctctgctatcaccaatccttcccttccctctactccacatccttctaaggagcatgatttgaaaactactttcctaggttaatgggcatgtgcatcaatggagagaatagtataagcaagtgagatgtagactaagcaaaatttaagatggagaagcacattttaaaaaattaataacttaaaagtctcaagttattaattttttttttgctaacn

SEQ ID NO: 6556 - DNA, 471 bp, Homo sapiens
  misc_feature (1)..(471): n=a,t,g or c
tttttaacactgaaaatgtgtttttaattgttatttacagttaatcagtgataccagtgtttagcttaatccagccaattgccagtcttgactccttctttcaacatctgttattaagatcttccttataaatacttagacaaattaatttagtgaaggagagcgatctgtggtccagagtaactcaatgtatggccatttggtttgcagacagcgtttaataggagtgtcatctgtctgtagcatgggatcttcaaaacccatcacaactgcagtcccttctacgtacatgaccttttcattataatttgactgcttcaatccattgtagtggtagacagtaaaagattctggaccactggagccctgatcaggaaaaaattcttgaagaaatgggcccaataatatgattcctaatccttctggatctaatttattcctcatgagatttatatattcaggatctgaaac

SEQ ID NO: 6557 - DNA, 457 bp, Homo sapiens
  misc_feature (1)..(457): n=a,t,g or c
taaaaattttttttaatctcagaatctactaatgtgacagacaaacggtatgcttaacagagtcataaatactgtgtataattgcttgaccatttctggcatttaaatgacctcccagaatattacacaagccctgagactagtgagcatcttactactgaccttgtacaataccaaagcttcataatgctaaagaaaaccaaaacaaaagacaatggtttacacagggaaataaccctaaggcaatatgaaaacagtcataatttattactgataaagagtaaaggcatccttcccatagagggggggaattcacagggaacactaattatatcagatgaaccacggggatagaaaataggcccatttttaaaattcattgagaaattattactttttctccacaactggtgattcnataccaaatnttaaaccctgcnaacccttatgtgctacc

SEQ ID NO: 6558 - DNA, 452 bp, Homo sapiens
  misc_feature (1)..(452): n=a,t,g or c
tttggttataaaagattttaatatcaaataaaatgtacatgatcaaaaggctttgattgccatgtaaagcatagtttccaggttacatcaagtgattttatcttctcccatttcaaatgaaatgttgaaagcacaaacaatctgccatgaatgataagaagcaaaggcagcacatatcatctgcaagtttcttcccaagctataaaatatcatgttcatatttttcctgtttgtgatcccaaaacaggcaatattttcatttcatccactctattcttatgtatttgaaaagcaggtgttatccacctaccacaagagcactgttcaccataccagttgaaggaacccaacttggcactgcattttgggcaaagaagctgtccatccatcactcccaacaaagcagattccatccactgtacaggttcaatgaaataagatgtacattgagg

SEQ ID NO: 6559 - DNA, 410 bp, Homo sapiens
  misc_feature (1)..(410): n=a,t,g or c
tttacatttcctgttttcattttattgggaacttcaaagaaaagaaagagagacggattggttcccaagacaagccgtgacgtagactcccaacaagctggggaattctggacagcnaaggggtggacagtgagactcagcacagcccaaagtcaaaggcattagggttgttctgaaaatagagattcaagaagccctggaaaatgctcttatccatgagaagagcacagactgtggggtcccacttcatggctgatatccagagccgcaggctgtgcgtgtggctcacacagtccagtatcccatacacatccagccgctcaaaccagggccagaggaggtaatcaatcatggatatacaggttccaccaaagaaggtggtgttctgatactcaagaatctcttccagg

SEQ ID NO: 6560 - DNA, 393 bp, Homo sapiens
  misc_feature (1)..(393): n=a,t,g or c
cgtttttccaataaatatttatttccaataaatactacatgactatcttacatgtagtcactattcaaaggactggggtaaagacaacaaaattcctagtctcagagcttccactctagtgaaagaatgtgaaagttatcagtattcagatggagtttaaagccaataggcagtattttgagtgatgctatagagtgcaaatttgtcaagatagcatggaagcccatggttttatttatttttttgagacagggtctcactctgttgcctaggcaggagtgcagtggcatgctcacagcaacctccgcctcccgggttgaagcgattctcctgcctccgcctcctgagtagcagggattacaggtgcactctaccacgcctggctaatttttg

SEQ ID NO: 6561 - DNA, 472 bp, Homo sapiens; identical to SEQ ID NO: 2270
  misc_feature (1)..(472): n=a,t,g or c

SEQ ID NO: 6562 - DNA, 207 bp, Homo sapiens
  misc_feature (1)..(207): n=a,t,g or c
tttagaggaaacaactatttaagctttattttcaaagtctaattttaattcagactgaacaaacaagcagaaaagtgagaaagctaactgtattagcagacacagatgtaccaaatgtaaaacagtgggttattaacagaactatttacatgcatatttacaagcaatccttttgtaccnagtttttaggttagccgggaaaagatt

SEQ ID NO: 6563 - DNA, 255 bp, Homo sapiens
  misc_feature (1)..(255): n=a,t,g or c
taggttcaagttactcaacaattttatttacccattctacacacacgcacacaaaaacacatttcaaatacagttatgcacactttaaatggatctgagtggcatactttgttatcagtgtcacccgattaaatcagaatgttgctaaagacttatgttcctatttcaacagagcagtgcctaggaaatctacagtagaactctcttcctaggcttcccaatctgacccattcccattcaacccagaggtgctca

SEQ ID NO: 6564 - DNA, 139 bp, Homo sapiens
  misc_feature (1)..(139): n=a,t,g or c
tcaacaaatatttattgttcatcaaagacgagccagattttatgggcatttgtgatggaggctggccttagctttaggagaaggaactccaagagcagtagtgatctctgagatcaccttgttcaccctcctcggggca

SEQ ID NO: 6565 - DNA, 271 bp, Homo sapiens
aactatgtgttttgaaaactactgccttctcagcccgaaaatcgccgtctctctcaggctcactgtggtttcctttttctgacacaaaggcaggcacaggctgcccctccacatgtcttggggatcagatcatgccccgggctcataggaaccgaaactttggggcatctgagactggctgattcagattcaaagacaatcacacggaaagactgtgggcagagaaggcaatgcctctcccctggtccgctttgctgtcactattacataa

SEQ ID NO: 6566 - DNA, 194 bp, Homo sapiens
  misc_feature (1)..(194): n=a,t,g or c
tactttttatttttattttgtgggcttttaacataaaaatacagatgctcccgtcagagtaaggcatcgcaaccttcagttcttccgcagcaccgggagtcgagggggaggcatggagcgcgggaaaaggaatcgagcgagggaaagggatggagcgtgcggcgcccccaccacctcggagccagcggagggcg

SEQ ID NO: 6567 - DNA, 212 bp, Homo sapiens
  misc_feature (1)..(212): n=a,t,g or c
gcagtatattaaatttaatcagagattacacagagtatgacataaaacagcagttgactagaataatttgcaacacatgaaaacagtttagaaaatggatttaggtcatattctctgacagtaagtttgttggaaatacaggcatagaatcagacagatttatgtgtcatctggtgctcccttcccttgtcacatcaacttgaaccgatagt

SEQ ID NO: 6568 - DNA, 409 bp, Homo sapiens; identical to SEQ ID NO: 744
  misc_feature (1)..(409): n=a,t,g or c

SEQ ID NO: 6569 - DNA, 307 bp, Homo sapiens
  misc_feature (1)..(307): n=a,t,g or c
tttagagttagaacatcaagactgatctttatttcacccagaggcagagtgataaaatggcattcttctctatttaaattctatcccatctttcttcttgtccttcctctcaaggttgctggcagaggtggttggggctatgtgcctggagtgaagattctgcccattggtcaagagacctccctctcagatgctggctctgcccctgcctttgggggtcgacccttgtactcgcaggaccttaggtgactagttgtttcttcttttatttcccctattcgtgatgatcggaaaggtgaaaaacctg

SEQ ID NO: 6570 - DNA, 437 bp, Homo sapiens
  misc_feature (1)..(437): n=a,t,g or c
tttctttgttaggctgttttaaacgtcttagcaggatgtggacccaggtggctaacggccaatttggcgacgcaaattcttctcaccacagtgggttcagagaatgaggagagggctgggaggtgggctcagggactctgcatgttgctgaagggtgaaagagctggaatgctggctcatctggccccatcaactcccaaccaaatttgtgtgtccttaggcaaagccaccccctgtctgaagctcagttttcctgtctgtaaaatggagaaaccagacactgtccacacaaggtgaaggggcatccaagaatgtgggaggatttaacagcattgtagctgtgggctgcactttgggaaagttcaaagggctcctcgaatgccagggaagtctagaatagtgacgggttccggctgcccaagtttgttctccaacct

SEQ ID NO: 6571 - DNA, 428 bp, Homo sapiens
  misc_feature (1)..(428): n=a,t,g or c
tttaaagtggcacatatttattatctcattttctgtgggttaggagactggacatggtttagctgggttctctgcttcagggtcttataaaggtgcaacaaaggtgtcagctggggctgcaatctcattggaggctcagctggggaaggatctgcttctaagctcatgtggtgttgacagcattcagttacttgtgtgttattggattgagggcctcggtttcttcctggattttggctggaggcatcctcagttcttgccatgtggaccttcccaacgtggccacttgcatccttgtcatccagaagcaggagctggttcaagacttggtgctggttgctacagtaggtaggagtgtggccgtggagagagagacagggcagagactgtccccagagtaacactgctgaaacatcctcagtgagagt

SEQ ID NO: 6572 - DNA, 298 bp, Homo sapiens
  misc_feature (1)..(298): n=a,t,g or c
tttttggagactgaaacaaaccatgctttatctgtgtactttgagaaaatccatccacaagaaaggagccaagcgtcagtttccaatggggggaacattctcatggaggtactgtaaggctaagtctgtccacttcatttcttgttctttgacagattctgtggtgccaccattgtcttgttcaggttcaggaagctcattcagtggtattgcgacatcctcataaggcagcttgtcttctcgccaagcatcatcaatcaaatccaagatccttccatctctctgaacctcactgtcc

SEQ ID NO: 6573 - DNA, 423 bp, Homo sapiens
  misc_feature (1)..(423): n=a,t,g or c
tttggtggggaatgcaggatccacttttttattgcaggaagactatgtctagagcgaaggctacacagaccccatgatgggggagtgggggcacccacatgcggggggagagggggcaggggcggagtcacagcaagcatggcctggcacagtccccggcaccagggatgcccaggcaggatgggccagcagccaggacaggctcgggccccctcctattgcagatgccctctctccccagggtcgggcagggcctgaggtgggagaggcctggaggtgggcagggcccaagggagattgtgctatcagggtgtgtccctgagaaagggccgcagacccctgcccagcctcactctctccggcaccttcagaacccagaagctactgccaggacaggagaggaggcaacatcagctgctggtg

SEQ ID NO: 6574 - DNA, 509 bp, Homo sapiens
  misc_feature (1)..(509): n=a,t,g or c
tttttcttttttcttttttttttctttttttccctgtttttcctcttggccccagccctgagtgggaaatcattcaaccacccatcttttggtccatctgtccatccactatgtcagcaggtccagcccccagcgcctggtcacatgactgtctcccactcttcctgtagcagggcaggtggccgctcaggcccagaggcatcctcgtccaggcctgagcaggagccgttgaggaacccatcgtccttgggagcagccatggcaggtggtgtggtctcgagggtctccagggctggggtccctggcttggcatggccaggcagctgagggtggccgttggtggtggcagtgggcagtaggcgggggctgaggggcaggccgagtcccacacgggggccgacattggtcacacttgtgtgggacaccatggggccgtagctatagctgctgctccccctgcgtgcctttcgcttgaagtccagttgcagtgttcagcgggtcccaaattt

SEQ ID NO: 6575 - DNA, 271 bp, Homo sapiens; identical to SEQ ID NO: 636
  misc_feature (1)..(271): n=a,t,g or c

SEQ ID NO: 6576 - DNA, 468 bp, Homo sapiens
  misc_feature (1)..(468): n=a,t,g or c
gatnaataatnntgattttagtcaagtgaatattgatacatggctgaaaaagcatgaaaataaaatgaacacatacggganttactattaacataagcgataacatcaaaacatctggtaaaatgcagttaaaaaaacaacacaantgaantggantgtaaaacattttcacagtnttcaaagcttttgtaagagacttaggttctaaaagaggagtactacaggangaaactagaggaaacgggattttcatccatgtcctgtgtatctgctgggcaacaggtcagaacggccagtatgttattccctgcaggctgcctaggggtgctctcctcaaacagttcacctgaggcctcctgcatctntggaaggttatggacacaggcaaccagttactcaggagtnttgatggggaaaaacnggtttttagggtttggggtttggggtttacncgtaattnacacntcc

SEQ ID NO: 6577 - DNA, 346 bp, Homo sapiens
  misc_feature (1)..(346): n=a,t,g or c
nttttttttttttttcagttgcagttgaactttattcatccgttcacacctgggtccctcccggcccccacctaccctggccctgcctactcagggcttccaanattgggtgtcggggtggctttgcttatcctccanatgccttcttcccagtatngtgatccgtgccctccaggatctaagggatgaggactaaaggggtctgttcctcctccaggcagctggcatggaaccgtccgtctcagcggctgcttggtggtggcggtgtggatgggtgtggctctctgtttgctggggggtattctgccaggatgtataggaagccacccagggctgcnactgctgt

SEQ ID NO: 6578 - DNA, 470 bp, Homo sapiens
  misc_feature (1)..(470): n=a,t,g or c
caggtntatnttntttaattatcactcacatatttcacaggaaaaggantntagcaaatgggtcaaggtggtntaaaaaaaaaatccaggtttntacatgtctctctgtttacatctgggagaaaggttntcctggcatcagtcgcagcagctgcacttctctgacgcccctttgcaaacacagccctgggcacacttgctacagcccacggggaggcaggagcagcagctnttnttgcaggagggtgcatttgcnctctttgcacttgcagggaaccagcgcagggtgcagggagacaccagcgggcgcagggagcagttggggggncccattgcaagcccgagggagagactgggacttttcccaaggagagaagcgaaggaagccagtggggggcagctcgtgcccganttccttcagccccggggggntccccctagttctaggagcggnccccaccgggtgggat

SEQ ID NO: 6579 - DNA, 55795 bp, Homo sapiens
  misc_feature (1)..(55795): n=a,t,g or c
gggccctgtcctaaggcacatgcatgtttcaaactctgtgtcatgtttgctactagccaaagaaaaagaccctacctcttgatgggaggaacagcaaagtcacattcaaaggggcacacatacaaggataggaggaattggagcattttttgccatctaccacagggtggtttctctgtctctctcactctaattaccaatggttaaaaattggagcttcatcttatcttgaaaaatcagctagcctactttattcacttacacttcctccctcatctgttggcatttgagttgtgataatgcctaatttacaagattgtttttgtgaagttagatatggaaaaatttgacaaaagcagaaactcaatatatgttttctcctttctgaacaccactagtcatgaagctgctacctgccaatgaccaaggagagcggccaagatgaagaacaagggagtcatagaggaggtggctggagaataatcccttggtctgttttagaagtatagaggcattaggaaacaaaactcttaaagaatttataagaaaactaaacgtactttaagaaattaaaaggagcagtaggaaacatatcagtttgctctaagtgaaatatctcaggctctgaatggttcacccaagaacctgagctcattcctgggaggcacctgcagaaaactggttctggtcctggtccctgtcttcaggtggctgtgtgtaaacatcttaccccagtgtacacatctgcagctggtaaatgcctgggggttttctcactgctctccaggagaatcagcactgccctgttccttcctagcctgagtcaggactgagcagagaatcctccaccacacacagcaggcactatctgccacagttcctttccccgatagcttcaaattttctgccttttgaaataagcctacttttaactggaataaataattggtcaattttcacctcaggtgaagaggaaccaagcctctggaaacacttaggaacaaactgtaaaaaccaaaggcaattgtgtaaccggttaaataagcttgctggactttgtccctgtgtatgagttagacaattctttcagctagtttgagtgacgcactgaccagtgaagcgcagtgaagcagtgggaaccggaatatccaaagagtggtttgaaggagaaagaagcattgtggctttatatcctctgggcctgggtttcctgaagtcaccacacatagaggagagagaaaatggctgagttaaaggtaagaaaccatctgacaagtttgctatggcttcttcagccaaaatttatggaagtttctgagaacttcagggtatcagagttggaaaagacttagagaggccctggttcaaacccctgtgttcagaggcttccctgtggtgtctgtgggcacagctggagctgaagaacaagggaaaggtgataaaggaaagaaatgaagctcttattggtcatcccttgcctttgttcatttcaattattgtcttggaaatctgtagacatcctaagagctcccctccactacggacatgcacgtttctctctatgtctttttcccaacccctgctctgacaccttcccattgctgcagcctcatggaccacttccggtgaccagttagatatgcttgatctatttagttaattaaggctctgaatcagcccttggccagaagaagcacctcctctaggaaatcattccttctttttagtaataccaattgaaaagtatgtgtgggttatgtgctgttaggtgctaagcattttaactatgaattaactcataatcctcaaaataaatctggggtatagagagaggttcttgtttcaattagaaaagtaatgcttggagaaactatgatttgcccaaggtcactgccaatagatgacttgattagaagcagggtatgtttgaatgcgaagtccaggctcaaaaaggggccttagtggctcctactaaactggtatcttaaggcaaggaaaacagaatatgtccctaatatctaaaaccatgcctagtgcccaggccaggcttgaatcaatgctcaatgcatgcatgtgtaantgaacagaactgcccagaaccttggctcaggccaagtaggccagaccaccccacaacagacatcttccctgaatgcagggtttgagaagtgccctaatgccctctaactgatgctgagtttgaagaatccatcagttaaggggaggtgtttctgagtttgaagaatcaaacaccttcctaattggtaggaatcctgaaaacactccacaccggagtaaaagactttggttttttatctttatgcctgactaaaagttaactctcattctttcattcagcaaatattttgtgctagtgcatgacactgcagattaatatcgtagatgaactgagtctgggctaggtagagtcaaaaaaaaatttcctaaaggagcctgtacctaaactgagtcttcagagagaagttggaactggcaaagtgaggaaggacggggtctggagggaagagtgagtgcaaaggcacagcacatacagaatgcctgcatgctctagaatccaaaactgtgtcagccaaatttgagttgatggagggacagccaaactgagatacccaggcggtggttggatttatggatctggatttcaggggagtgggcagggctaggggaataaaactgagggtcatgatgtcagtggtaggagttgaagtcttggaagaaagagtagatagaaactttgttttctgatgaacattctatgaagaagttcagcagaagttggaaacatctttaccatttataaataaattttatgtaaatcctatcctgctgtcatgtttaagcaacttattatgcccagcaccaggacatcaatgttaattgcatgccagtctttgctctcagtttcaaaggcattcttccctgcctgctgtctaatctttacaaagaaaggttaactccagaggtcaggaatctgaacacagaaaaccagattgcatcatattcattctaatcaataaacattatataatttttaaaactgtttctcatcttttatttcttcattttaatgaatatgtcaacacaaagccgtaaatgaaatcacatttacacaaaagtacaactggggtaagaaaattcaaaagataaagtaataaaattaaatttaaaatgaaataccctatgtatttgagtaagttgcttagcttctcccaaccttggtttcctcatttctaaaacgaagaacttgcttaatattcaggctctgggccccaccaccaaatccttgattcactggctctgggtctgtatgtaacaagcttctggagtgattctaatgattagccagagacaggacctaccattctacgtaactgatttcctcttgctgctgtaaaaaattaccacaaatttattggcttaaaacaacacaaatgtattatcttgaagttgtggaggtcagaagtctgaaatcggtttcactgggctaaagtcgaggtgtcagtgtggctgtttcttctggagactctatgagagattgtgttttcctgccttttccatggattctgtttcctcttctagaggctacccacattccttggtttgtagcctcttcctcgatcttcaaaaaaatgtatctctgcttttgtaatcacgtcacattttctcctcttataagtcaaatctccctttgcctccctcttataatgacacttgtgattacatttaggatacacccaaataattaggatatctccccatcccaagatccttaattatatatgcaaaagtctgtttggctagaaaaggtaatactcacaggtttcaggggttaagccatacatatctttcagagtgagccattagccattattcagcctactgcgataatgtgcaagttccctttacaatctatgttctatgttcccatcaaggttaattagaaatattagactctttttccacagaaaaaaaaaatgtagcagtagtttcatctctaccctgacttctctctctttccttcatgcccagtaagagaagtgaggtgcaccatctgttcatctcatcaggtgttacctagaatcagagtcaggagaaagcacctcataaaactactctgacaagtaaaccatatcctgggggaccaagtganaattaaaaagctgtatactcataagctgccaaagagctgatggtactgaagtcacatggagctcaggaatttattcttgcatttagaaagtatgcatataattctctcgaaaagaaatgaaatcatatttttctgtcggatcaaattattcagaaatccgaactgtagaaaacatacaaacacacttgcttaatgttagctttttaatcttatttttgtacacagtatacttttacataggcactgaaccagctggagatgaatgcttggattttcacagctgataaaagcagagttcagattctgtccttgagctcaatgtctggagaaagcagctgtgaatactgcttccttaattcagatgcctttggccgtgaggggcatggcattttaaagctgcaataaactctgtactttttctctcaggggattagaaaaaccaattgatttgatagtgactcagcagttttcaccttcctctttagccaatgccctgcagctaagattgagaaacggattcagaactcacacctcttggtgcttggtggctcccttccaaaccatcagctgttctttctactttctttcctattttttaaagcacagtatactttaacataggcactgaaccagctggagatgaatgcttggattttcacagctgataaaagcagagttcagattctgtccttgagctcaatgtttggagaaagcagctgtgaatactgcttccttaattcagatgcctttggccgtgaggggcatggcattttaaagctgcaataaantntgtactttttctctcaggggattagaaaaaccaattgatttgatagtgactcagcagttttcaccttcctctttagccaatgccctgcagctaagattgagaaacggattcagaactcacacctcttggtgcttggtggctcccttccaaaccatcagctgttctttctactttctttcctattttttaaagcacagtntgaatcaagtgcttcagaaccatttatactaactcgtgttccaaacacataaccctgaaccctcttctaaggccaccagttacaaagaatggggaaggttaatgagtaactccaccagtgcctgccagaaagctcagctgtactccagccttccttccttttttgcagagagaaacaatggcggcagttgaacaaacggaaggcactgtaatgcccagtggcttcagttcacagggtggttctaaaattccattttcacagaattgaagataatttggggttattaccaattctcagcagctcaaattcaatcccgttgatggtgagcagggggttcattttgagagtagaaaattggatgcagtggagaatcagaatgttggatggtctctgccatttccccaaagatatcatcctaactgcatgctgctgcttttaacaaatcaggatacaacttagtattttttgtgttgacaaattttcaaatatacaaaatattgagtctgaaggcaaaaagaataatttttcacttccattgcttcctaggtcataacattcacatctgatatttcttccaaatacagactgttgttggcctgatcatcactcacacatccaggcttgttacatctccacgccactgagtatcagggaacctgccccaatattcacgtaggttcttttctattttccctaagcgtcggccaactttagaaataaagggacagagtacaaaagagagaaattttaaagccgggcatccgggggangcatcacatttcggtaggttccgtgatgccccacaagccacaaaaaccagcaagtttgtattagggattttcaaatggggaggcagtgtgcaaataggtgtgggtcacagacatcaagtactttacaaggtaatagaatatcacaaggcaagtggaggcagggtgagatcacaggaccccaggaccgaggcgaaattaaaattgctaatgaagtttcgggcaccattgtcattgataacatcttatcaggagacagggtttttaggatcaactggtctgaccaaaatttattaggcgggaatttcctcttcctaataagcctgggagcgctgtgggagactggggtctatttcacccctgcagtctcgaccataagagacaggcgcacctggaggggggctgtttataagcctatacctcctggntcgtattctctttctcagggatgttccatgctgagaaaaagaattcagcgatatttctcccatttgcttttgaaagaagagaaatatggctctgttctgcctggctcaccagcagtcagagtttaaggttatctctcttattccctgaacaattgctgttatcctgttcttttttcaaggtgtccacatttcatgttgctcaaacacacatgctgtacaatttgtgcagttaatgcaattattacagggtcctgaggcaatatacatcctcctcagctgacaggattaagagattaaagtaaagacaggcataaatcacaaggatattgactggggaagtgataagtgtccatgaaatctttacaatttatgtttagagattgcagtaaagacaggcataagaaattacaaaagtattaatttggggaactaataaatgtccatgaaatcttcacaatccacgaacttctgccatagcttcagctgatccctccgtttggagtcccagacttcccgcaacaactgaaaactctgggaaggcctacccttcacccacttccacccttcttatatctcttaaggagctgtgttcagatggttacatttcgctcgctgagcaagactgcattttcattatcctgggctaaaatcaattggtatttaagttagagcaaaaagggttctaaccttatttacagcagcacacatacacttacattagaattggctttaagggaaaaattcaatcaatcgacaaatttccactgattaccttttatgagccaagactgccatagtctcagccttcatgcagcttataggctagcaaaaaagccagacagtgcacaagaactcacaagtgtgttgagtgttgcaagagtaagtttcaggggctctccatgacttacctggttgagaaaccctttaactttttttttttctgggtgtaaagtgaagagatggcaatcagagtaggttccattgtgtcattgtgaaaagatgctgggctggcgtgtctcctgaaggccacccatatntttaaactttattttcatgcattcgcacaaatatagatgtgttccatagatgaggcagatagcagaggctttntgcctacagcaaggctagtttggagagggttttgctgtcagggttggacccacacaccttttcatagatgcttttttttttttttcccagagtttgaaagggaaatggagtttcaagttcagggaggttacagtgtagacccacaaatcagctaagtacagctaagggtggagnagtttatgcaatatccagcactcttctgattaattagaagtctttaaaattcaccagaaaccatattgtcttccctaaatgattctatatgtcaagacacagtaaagatattatatgtggaacatcatacacaaacataggtccatatagaaattcttaccttagtaaactgccaattttctgaaatgctctttaaatcctgctaatggtggcatttgtgtctttgtcacctacagtacatttctggatttgggaatgagtgttcttcagaggatcctcgctgcccaggttccctgccagaaggacaggtatgagcaaataaagtgcttagaagagctctgattcctatttcctggatgactagctttcaggccaaagtgcctccacccaccgtggttcttccaatctagcctgtgaactgtctagaggtttcccaagtcataggggcaatgaagatacagagcaatgacaacacaaagattaaaattggattggtggcacagcagccaatccaaactagtaaaattaactgtagggtttccagtaggatccccaaaaatccagggttaaagagaatccctcatattccccttgaacaccatggatgtgagcattatgataaaataacaaggtgctttcacatgtatgcacaaagatgttcatactagtgctggttagaaaagcaacaacacgggaaacaaaaatattttcaaaactttttgcaggccgtatcatagcataaaaaaatcctcatttcttaaaaaaaaaaggaaaaaatgcctgattattacagggttacaggtatgatagggtcacaattttggaggataagaatgcaaggaaaaataccaacatgtgaatgcttggttatttctggttgtgagataatgggtgatatcatatagtttatacattttctacaataaatatatattacttttataatcggggggncaagtcacatcaaaagttgttacaagaaacatatcgggttgccagatggtcatgtgcagtcgcccagagcatccccatccccctactgagttggttggtgggaaggtgggatgcttttcggatgggagtaatattgtttattgcatcctttgtttcagaataatcctcaggtctgcccctacaatctctatgctgagcagctctcaggatcggctttcacttgtccacggagcaccaataagagaaggtacaaggattagatgaattctgacctgcagactgtgggtactatgacagggactttgtgctgcctccttccccctgggccacagcctcccagagctgcccaagatcctgcttcttataggctatggtctgggtcatggtcagaagagaatgaacttcctgccagctagcaccaagtgactggtggaagaaggtgaaggaaagctgcacagagctgggaaaatacacatgtccagttccatttacaaattacctcctatattcagaaggaaatattcctaatagtttggtcttcttctaaagactgtcctgttgagttttggcttggggtttacctgttttgttttgtttttataatgactaagtcacaattatggaagattcagagcaatatctttctcagctgactagaggtatgttctttgcaagaaaatgttgggtaaacgaagtttggatagttaaaaantcacatattatggcccactgtggtttgaattaataaggtttttactctggtattcgctttgctagaaaccagcatattcatttacatactgtgccatgttccatgtttgctctaatcntacatccaggtcaatgaacgtaatcccttgattaactcatatcaggcaggttggatgcagtatgtgttatagttttgggaggcagtaagtgttatgatttaaacaaatagtgtctaattataaaaattttaggctgaggtatttgtgaagaggaatgctgctggtattagagactcggggagaagggcatgtggtcttgtactgcttagtagggcagcctgggtttatctccacaggtccttctgagaagcaaatgagatagtaagtaaaaaactataatggaccacacaaatgataaagattgcaaggtttaatcatggccaccctggaggcaggccccctaagtataaatcctggctccttttccagctgtgtggccttgggtaaatcatctgccctcttggatcctctagttcttcattcgtaaaacaaagataattatggtacctatttcatagctgtggtgaggattaaaagaaaggatgtgtgtaaagcacattagcttagcttagcacattggcacaggcacatggttagtgctcagttaatgctagttattgtcatgataactatcattaagtattgccatcatagcagagtttctgcctcatttccagggtatctctaggaggctgtcaagagaactgggcatgatatgtggcaagtgctatgttacaatgtcagtatcaacagtacttttctctcaatagatatatgcgtgggaagaggaagagatagagaaagatttctatacatgtcaaaaatcaggggataattccttcactatttaatcatctctctctctctctctgtaagcccaaatagggtaagataagcacgcagataattctgtccattctaatttatgacaacctgtcctctatgactatgttcttgactttatggcccattccctaacaggccacctggtctccggattctgcagcctgtccccattattcancaatatcttcagccagcaggagctgagctttgttccagcaggctgaaaaggagctgttggcatttcattaagaagctggcactgttccctgaatcagaattaaatctctgttcagggcaatgtagtactgcctggggagttttataaactcagctaaaaaataagggacactaggtatggctcacccatctatttagaagaactctccaaagatatccacaagaattttgtggaaatgcttcccacccaaaatctccagtgggaaaatgggaccagtcttatccataagtaggccagcctgaaattcttagttactactcatctgaaccatagcatacagggccaccacaaaactattaaagagtctatctacctacctacgtacctacctacctacctatcagggattaatttttatcagattagctagctgattgatcccttgggtcttgaaaaggcaaaagtctggagagataatttggaaaatgtggactgtgataaaaattcagaagattaagagaagaaaggcaatttaacaaacacatgataagccagcagctactgtatgccaggcatttttggtacacaaactctctgagttctcacaacaatcttaggtgacaaggatgaagaacataaggttcaggaagtctagtaactctcccaggatcacacaggtggttccaagacatacacacatgctctgaacttcatatactggganctggagaagcttagtaagaccaaggtctgaagtcncgtcctcnagaaatggagaaatcaaatggaaactaaacagatctagccctttttcccccagatggctcaatgttgggccaggccaactcaactcactgaggtaaactgtccttggtcttgaaagggccaaagcctgttgattcaggtctggtcttccgttgtccttctgtattttgtcagggcagtaccctctgaaaggacttgggtccctcttagtgancttcaatgtcccttccagcttctggaaggtcttatcctggtgtcctttcaaattcctttatcaaagtcttcttcccttcctgaagcctgaaatctggtcctggtagagaggacaccctttaaaaagaaaagaaagaaagacaaattaaggcataaatgtactacaataaaacatggacatacactcttataattttagagtacagaagtgttaatttatttttattttattttaagttccagggtataggtgcaggatgcacaggtttgttacataggtaaatgtntgccatggtggtttgctgcacttatcaacctatcacctaagtattaagcccagcatacattagccatttttttaatgctctccctcccccaatcccaccccccaacaggccccagtgtgtgttantcccctcactgtgtccaagtgttctcattgttcagctcccaattatgagtgagacaagcagtgtttggttttctgttcctgctttagttcgctgagaataattggcttccagttccatccatgtccctgcaaaggtcaagatttcattcctttttatggctgcatagtattccatggggtatatgtaccanattttctttatccagtttatcattgatgggcatttgggttgattttatgttcttgcattgtgaatagtgctgcaataaaaaaaagtgtgcatgtattttcataacagattgatttatattcctttgggtatacacccagtaatgggattgctgggtcaaatggtatttctcattgtaggtttttgaggaatcaccacactgccttccacaatggttgaaataatttacattcccaccaacagtgtaaaggcatttttatttttccacagcctttccagaatttttttttcttataaattaatatcaaaaagacaaacccaatagaaaatgataaaggatttttaacaagtaattcaacagaaaaactataaagagccaataaacaaatagacttgttttttggaaatattttgtattttctaattcataataaaggaaatacaaaataaaatgagatactatttttcacctaaaacactaaaatttttaataatactccagatttgtgaagatgtgggtgaccaggcactctcacacgttgttagtatgataataaagagttaaaatgatctgataattttgtttagaaatgcactggacgtatctgaaagaatatataagaaatatataagaaaatcactaagctctgatgctctgaggaatagccctgaagaaactggaggacgaaggtgccatttacctttcaggactttttaattacttgaattatttttacctttggcatgtattacttttgtaattttaaaggagaaaattgatttactatttcaaaaataacaaagataccacccatattctctcaagctgcgtagaactcattgttcttgccttccagagcaaggactagcatcctatgatacacacataagctaatgtttttctatggattttcctacacagatatccctcaaggtacttccccttcccttatagtttttagaaaagacaattcttcattttttggcagcatggaaataaccatgagtcagagtccatttgaagcatgatgggtggaatgaaaaagtgagaagaggccagggctgtgggcagcagatggccatgaaaagtgatgctgtatcattgcttcactgcttcacacattagagcctacaggtcgttgttgacttgagtgtcttcctgatggtactgcctgagccattctgtgtatcactcagaacattactctaaggcttgtatatcttgtatgtttttccctctagctggctgtataggattctaccttcagtttctcacaagccctttgaatccattgacgaaggccatgtcactcacaactgggatgaagttgatcctgatcctaaccaggtaacctggtcctgtgaattgaagcttatcatatacccaaagccttgactagaaatacctaaatagaataccatggtcattggaaaaaataaatagttttttaaagtattattttaataaatgctaaagtgtgtctgttttctgctcaaacttgggtggtgtattagtccattctcatgctgctatgaaaaaataaccaaaactgggtaatttataaaggacatatttttaattgactcacagttctgcatggctgaggaggcctcaagaaacttacaatcatggcggaaagggaagcaaacacatccttcttcatatggcggcaggagagagaagtgttaagtgaaagggggaaaatccccttataaaactatcatatcttgtgagaactcactatcatgagggtaaccatccccatgattcaattacctcccaccatgaatgtccctcccacaaacgtgaggattatgggaactataattcaagatgagatttgggtgagacacagacaaatgatatgaggtgggaattttggaaatgatggattgattatgtatatacatattgttaaaagaaaaacctttgacaaatctaatttaacagagtttaattgggcaaaggacaattcaccaattattctacctgtagccaggataggttctgagagattccagtgcagacactagtagaagacgatttatggacagaaaaaggaaagtgatgtngagaaaacagaaatgaggtacagaaatagccagattggttgcagctcggcatatgacttacttgaacacagttttaatagtgtgtcaccatgattggcacaagagtaggttacacatccaattaggttatggttcactatgtatggagaaacctttaggcagaacttaaaatntgtgaggaggcaactttaggacaaacttgattaacaatctgcgtgtgtgtgtgtgtgtgtgtgtgtgtgtgtgtgtgtgtgtgcacagcgacacataagcttgtatttctctnccctaanggcatataganngacacnagagtagnncngacttactaaaacngcncnggtgaatnggatgagcggaaattttatgggtgggtcaaaatattttatattttatnggtgggtcaaaatatctacacgctcaggggttttttttgtttttaatctaaacttaccacaaaatatagaaaatacatttaatacagacatctttgaagnnaggcctttgaaatctggcataggggtgagagtcttgctatctgggctgaattatgcaagtctattgtggtcacagatcactatcacagtctcttcagacctaggacttccattctttttctaggagtttcctccttttggtctantaatagtgggcgttttctctaattatcgttattacttacgtactctgcttgcagagtatataagataaaatgagacagaaccagtactatagcaatgagatagacccagtgctataaacgactgagctctttttttaaccttctgaaaaccccagtgtattgcctttgtccctgaatttaagtacatgttgctgataataggtatgtagggcaggaagaaaaacagacctgggtttgcatccctgcccatctacttactagctgtgtcttaagctatgatgtttcaattgtaaaatgggatgataacatttgcctcacagtgctattgtgaagattatgagagaataggtgtgaacctgcttcatacaatgcctggcatgtgataggcaaaaaccatgattctgatacagctatttatatttacctgaatttacattattcaggtaactttatttcttcattttatattattttttactctgaaggcttcttctgccctctttccctccctcctactctctctctcctccctctctccccaccccgccactttccacaacccaaggaaatctcctgcttcccctttgtttgccatgacattttgtctatacctgccaatctccctcccctaagtgcttaaactttttataaaacaaaagtcaaaataatttataaacacctttggtttcctgcccagatctctctcttgtcttaattatggaaatctcagcgaaataagcatctgcttgaatgttaccaccctctctaccagggacaggaagggagggaggcatttagggtggaaaaatgtgaattggtatttaaaatactatctacctcatagccactttgaaactaagatattttgtttaaataattgacccttaaacttgtatgaagtttaatgcataaagcagacatctccctggtccccagctggcctatatattgcctttaagcacattgcaaaatgcagcccctattttaacccccaaccccttagactcagtcccccacacaaagggacacagacgaggcattccgctcctccctttccccttcagtgggacaaggcccttgcacagggcacagcttgcacaaccaacctggggaccctgacttcacctcattcctgagtttcatgtggattcaagtaatatgggtatagtaattatgtatatgaagttaactaaatgagggattataagaaaagtccatgggcagatttggataaatttaaattattgtttatttataatgaaaaataattatttattattattttgnttcaagatagcaatcaaatcagtagtggttaacagggtaggctggggagttccagggctcctgcctgctcatgtcgatcacaacaattttctaagcctctcaaccttaataaatcttcatagatctgtttatagttgtgtggacaacagtggagccatacttcttttacatagttttattcggggtgggaggttaggttttaaacctaacctttaaagaaaatatgtgatgtggctntactttgagtgtgatgtgtaatatgctcagtaatatacctttattatatattattatttccttgactatcattgctacattttatttaacatgaatacaccctttcataggaactattttggagttcgtgtgacatatccatggaagacaatcttgttctaatagaatttttctagctttgtcttttttttttttttttttgagacaagagtctcaccctgttgctcaggcgggagtacagtggtgtgatcacagctcactgcagccttgacttcccaggctcagatgatcctcctacctcagtcccctgagtagctgggaatacaggtgtgcaccacaatggccagctaattttttgtatttttggtagagaaagggttttaccatattgctccaggctggtctcgaactgcaagggctcaagcaatgtgcctgccngagcctcccaaagtgctggaattacaggcatgcaccactgcacccagcttagcttggtctgattgtatgagtaaaatatacttataaaaacccaaaagtattgtagaaattaataaaatattactggacgtctcccatcattaagtgagagtcaagtatataagttgtacatgttaattcattatttcataaatagttgacatacattttgaccaggaagtttgaagcaactggattaaaaagcttgagttaatacagaggcatcaaaatagctgtatcagggtgggcatggtggttaagcctgtaatcccagaaattggggaggccaaggcaggcagagacctgagactgggagtttgagaccagcctaacctgaggtcaggagattcgagacagcttgaccaacatggagaacaccatctctactaaaaatacaaaattagccaggtgtggtggtgcatgcttgaattcccaactactcgggaggctgaggcaggaaaattgcttgaacccaggaggcggaggttgtggtgagccaagattgcaccattggactacagcctgggcaacaagagcaaaactccatttcaaaataataatgacaataataataatagctgcattggaagtttttgcttgttttttagcagaccctcagcccatatttgttccccttctccccgcttcccatgtctcccattctaacctatggttagaatggctttgcttttgtccttgaacttgttgccttttttctgttttgaattccctgaacactttctatatggtagccaccaaatgaatttcttctccaatatcttccctgctcctttgagaccttgtcttcacacacactgggagagatgtgcctcagaattcaatagcgtctcagtgtctctgtgaacaccggctccaaccaggtagcagtttattatctttctgacttgtgacctctgtcacctgccaactacttctctctccatgataaaccctggctgatcttgcaaaatctacccttttgtcttttcttttacaccttctttacaagttaatatctctttccaattttatacttcattatttaaccacagcattttgcattcatcactttctccctcataacctcctccaaatatgtactccagactctcagcaagaaaggctgagaaaattatatttaggcaccctctgacagtccttcccagctgaagcctgtgtgataggtatgtcttcacctgtcatagaccaaatccaatacttcatcagcttcaccaactatccacattagtcatctctgggaatttgaagacctgaggactgcctgatgattcctccagtgtaacatttaatcccaaaggcagcatcttgcaatatgtgatcatcactgtcatccttgataccctctcaggaagactgggggctgctccccctaaagccttcattttctttagtgtatatttaatcagttatccaagaattaatgcaacctctttttgagtgtatttaaattcagcctgaggacataaattcaattaattaatacctcacataagaagtatacctaattttatgtgtctgcctctaatttctgaaatctcagaatttaatgaactaatctacatccagtttaaccatgattttacagatttcagctagaattcctgaattagcacttctctttaagagtcctttaaaatttatttttcttattatttcattctaacctcttgattgttgaaaaatcagattcttgactcagttaagactcagctganaaaattacctcttggttcttaaccagtataatttggatcaagtgagaaatacctcaaagctaattaaagaacatatcataaaatgccttctgtctctagtacatgcaaattataaaaaaaagtttcaaaacaatatacccttacagggtatttgctgtctaatttgtcaaactttccaggttttgccatcctgaaatccccttccctccacaaatgtcttggatttttctgcctctcttgcccaagtctgtcctagtcacagccagactccttgagaaataatctaaacccactttatcaccctcattcactctttaaccctatgcaattcagcctgcccagatgactctattgaaaatatttataccctctttacacaatantgcatcactctctaattaatacatatttttatttaaaacttacattaaagtgtcaatgcccagtaattccactaacacagagttaacaacttntaatgttttgggttctttccagtcctttctttttgaacatatatgtaaataaataattcctagggtcccatgtagccagtaaccaagagtaatttaaaataatatntggccaggcacagtggctcatgcctgtaatcccagcantttgggagnccaagatgagaggttcanttgagtccaggagtttgagaccagcctggcaacatagcaagacctggctctacacaaatgtgaaaaaaaattagctgagcatggtggcaagcaccggtagtcccaggcactcaggaggctgaggtgggaagactgctcgagcctgggaggtcagggctgtggtgagccctgttcatgccactgcactccagcctgggcaacagtgtgaaaccctatctcagaaaaaaaaaaaaaaaaaaaggaagaaaaaagaaagaaggaaagaaagaaagaaaagaaagagaaaagaaaagttaatctttacttgtttttcctgaagacattaaacagtatccaatatatgacccacagcaacactttttaaaatcccctttttccagtttttcccagactccaaccctctcacatctgtcttctctcacctcacctctcaccttccccaagctcttcatgccttgtcaccattgattgttggcttctctncttcctccctgtacattctgcctctagaaaatgatacctgcactgtagatcccctaccccatttggctgggatcacacatggtgttatgtgggataacacacacataacagtgacctccatggcaatactggagttcaaaggactccagtgagaataggcaaatctgaattttccgcagagatcagggaagggaagaggaagaggctatgaatacacttataatagtgcttttaaaaaaaaatcagttacatatatatttactataattaagctgatggtgtaatgcagtcttagattatttttatttaaatatcatattttgcgcctttttccatgtctttttaaacttcttgagtgtagatatttttgatattatattataatccaataaatgtttataaaacaattcctaatattgtgagatatttgaattttttccatttttgctattatgtngtaaatccacgctaaatataatccttttctcctctacatcccagcctggaacaacagacctccttcttttcttcctgaatccccttttttccctgggttccatgacattgcatgattcccaaacctgcaaaataagtattcttcaaggtcctgaactaaaatcttgatatagtttgactgtgtccccacccaaatctcatcttgaattcccacgtgttacgggagggacctggtgggaggtagtctatctgcacaagctctttctttgcctgctgccacccaaatganatgtgactttctcctccttgccttctgctatcattgtgaggctttcctagccacgtggaactgtaagtccaattaaacctttttcctttataaattactccttctcgggaatgtctttatcagcagcataaaaatggactaacacaactctcacctcccccttgtcatcatctcccctctgagagaaggggaagtacttactctctctcttcccctcctcttccttactgtctttcttatcctcctcttttcttctccttctcttcaccccaaccttccccttcccctctgtattgttctgctaaagctatcataacaaaaaaatactgggtggcttaagcaaaaaaaatttactttctaacagttctggattccaaaattgaggtatcggcagggttgctttcttctgaggcctctctcattgacttgtatcttctccttggctcctcacatcatcttccctctgtntctatagccaaatttcctcttcttataaggacaacaatcatatcanattagggtccactctagtaacctcatttaagtttaattattcctgtaaaaacccatctccaaatatagtcacattctgaaatacagggggttaggagttcaacatatgaatttggaggaggaacacaatctagcccataattctctccttctgcttctttttccctctaaatatctactaaggattcccaatcttttggattctctttgccttanagatgaagggatagttgttgataagaaataatcaagtgggacaaactaacaggaggaactccttgagcaatagaggattttcctagctcactacactgaatcaggtgccaagtccatagaatggtgatgcctgagtatacataagagttaccaggggacttgttgaaaatgtaaattcctcagtcttgctccccaaagatcccagttcagtaggtctgaggtggtactcaggagtctccccagatgactcccatgcaggttggtgctggactgcactttatgaaattctgctgtaaagtgtgctttcaggatctctctggttccttttttccttttcctacctccacctggttcagacctcatttcttcttacctagactatgttaatgaccttctacctgattcctatgtcttcccctccctatcccacaccgtgctgccagaatcagcgtgctaaattatcatctcaaaaatctttaaatttaaccatcacccgccccctccactgcccagccaatccagtgcaggcttccagataagagatcaagagctttgattcactatcacagcctttcagactctccactcacttccatgtcccctacctatcagtcacactagaaccatcgtcattttatctacctgggatttcctgttcttccatcacaaatactcacccatctaaatctcactcatgatttatgattcattttaaataatacttttttcattatgccctttcaatatttctcagagtatttaaggttctatgtctctatcatcttcatctgatctgcagtatccagtacatgccttcttccaaatagaatcgcaagtatttgttgaatttactccctgatagttcagatcctatcattctataaataaattagattgcatttctctaaatgcattcagtggtgtgtgccaacattacagtgcacattcccctgctcagcccttttggacagcttgctagctctttttacatttcatctccatcaacttacatttcacttcttgcaaagatattggagctgtctgcaaaccagatgatttcattgcttatatctcttattttccatatataagaatgttaaataggccctgtgccaggacttattcctgagagaacatttctatttacatttctcttccaaagttatttgcactgatccacttccttgtttttctatcatgaggttttcacatttccaggatcttctgtnatggattacctgagggaaaaaacaatgtcntgttcacctccagcatctagcataaaatctggcacacaganaggttcaataaatactgtttgaaataattaatataaggggattagacaagaaacnttaaccctgaaggacctaagcagggttngtgtcccaggaatcanactggccagggtgattcagcactggaggaacagtnaacaaaggtcaatttggaaaaccaggttcaagaccnttnaaaggagggaaagcttgggtttaggagccaaggagatcaggaataatttgggaaacaggtcaagacaggctaagatcaaagggctcagggtgtaggttagtaanagggtctgaaaaagtgttggcatcagttcttagtaaaaaaaatttaactgttctaaaccatcagttttttcacttctaaaatagagatgataataataatcatagggagcctcagagagttgttgtgagaattaaatgtcatccaacaaatatttattgagtgactattatgttctatacttcgtgctaggtgctaggtaatggatttaaagctcttagctttacattcaaggacaaggtcaaatgagaatccaagttttcatccttgatggctcatcttcatttgttgctcatgaaagacttttgttatgttttgttttgttttttgagtacaggctggagtacagtgttgtgatatcagctcactgcaatctctctcttgggttcaagcgattctcctgcctcagcctcccaagtagctgggattacaggtgcccaccaccatgcccggctaatttttgtatttttagtagagacatggtttcaccatgttggccaggctggtctcgaactcctcatctcaggtgatctggccgcctcgggctcccaaagtgctgggattacaggcgtgaaccacctcgcttggcctgaaagacttttagaaatctaaattacagtgacttggatcctcattatctatattcttgcctatcacctcaaagaactccaacggatcaaccaaagcctgatttctctccacataattcatgctacctttttttcctcaaacttccaaagtttctgaagaattcaagtgagccactgttttattttaatccttcctatctttcttagtctggactgaaactcaccaccacaaattaccctggatctctctgctaacaactatttatacattgtattagtccattcttgcactgctataaagaaattcctgagactgggtaacttacaaagaaaggaggctcatagttccacagggtgtacaggaagcatagtggcttctgcttctgggagggcctcaggatgcttccaatcatggtggaaggcaaagggggagcaaggtatctcagatggcagggagcagagcaagagagagaagaaggaagtgctacacgcttttaaagaccagatctcatgagaactcactgtcatgagaacagcaccaagaaggtaatgctaagccattcctgagaaatccacccccattatgcaaccaccccccccctcttgctcctgctcccatcatatgaaatgctcccatcatatctttgccttctgccatgaattgaaaactttctgaacctctccagaagcagaagctgctatgtttcctgtgcagcctgcagaactgtgagccaatcaaacctcttttctttataaattactcaatcttaggtctttgtttatagcagtgcaagaacgaactaacaaagaaaattggtaccaaggagtgggacattgctataaagataacctgaaaatgtggaagtgactttggaactggataactggcagaggttggaagagtgtggagggctcagaagacaggaagatgagggatagtttcaaacttcctagagacttgttaaattgttgtgacaaaaatgccaatagtgacatgaacaataaagtccaggctgaggagatctcaaatgaaaatgaggaacttactgggaactagatcaaaggtcaaacttgttctgccttagcaaagaacttgactgcattgtgttcctgccctagggatctgtggaattctgaacttgagaatgatgatttaaggtgtctggtacaagaaatttttaagcagcaaagcattcaacatgtgaccaggctgttctaaccgcttatgcccacatgcatgagcaaataaatgacctgaagttggaacttaaatttaaaaataagtttagatttaaacctatatttaaattttaacttgtatttaaagggaagtagagtgtaaaagttaggaaattttgcagcctggccatgtggtagaaaagaaaagcccattttcaggagaagaattcaaacaggctgcagaaatttgcataaataaaaaggagccaaatgctgatagccaagacaatgtgggaaaggcctcaaaggcatttcacaggcctttggggcagttcatcccatcacaggcccagaggcntaggagggaagaatgattttgtgggccaggcccagggccttgctaccctgcacagcctcaggacactgttttctgcatcccagctgctccagctcctcctgtggctcaaagggatccaagcaccgcttcaaagggtgcaagccataagccttggtagcttccatgtggtgttaagactgcaggtgcacaggatacaagagttaaggcctgggagcccccacctagattttagaggatgtatagaaaacttaaatgttcaggcagaagccagctgcaggggcggagtgctcacagagaacctctactagggcagtatggagggggaaatgtggggttggagctcccacacagatccccgctggggcattgcctagtggagctatgagaagaaggctaccgttctctagactccagaaaggtagatccatccacagattgcaccgtgcacctgaaaaagccacaggcactcaatggcagcccatgagagcagccgcaggtgctgaatcctgcaaagccacctgagtggggctgaccaagaccttggtagcccacccctcacaccagtgtaccctggatgtgggacattaggtcaaagagatttttttggagctttaaaatttaatgacttccctgctatgtttcaaacatgcatggggcctataaaccctttgtcctggccaatttctcccttttgaaatggaaatatttacctaatgtctatacccccattgtatcttggaagtaactaacttattttatnttttacaggctcataggtggaagggacttaacttgtctcagatganactttggacatttgagttaatactanaatgagttaanacttttgggcactgctgggaaggcatggttatattttgacatgtgagaaggacaggagatttggaaggagccaagggcagaataatatggtttggatctgtgtccctacccaaatttcatatcaaattataatccctaatgttggaggtggggcctggcaggaggtgataggatctgggggacagtttctcatgaatggtttagcaccatccctgttggtactgtcctcatgatggtgagtgagttctcatganatctggtcattgaaaagtgtgtggcacctcccacctctctctctctctttctttctctctctctttctctctctctctctctctcactcctgttcctgcaatgtaagccatgccttctcctgcttcaccttctgtcatgattgtacatttcttgacgctcctcagaaactgagcagatgccagcatcatgcttccctgtacagtctgaagaactgtgagccagttaaacttcttttctttataaatnacccagtatcaggtaattctttatagcaatgtgagaacagactaatatgnacactatgatgactatttcaccgagaaattacttcaaaattcttggataggtggtactgacttctaatganatgtctgtctatcctcagccagtgttgttgagagtactcaagtcatccaatctagttgagtccatgggaaatttggagggaatctcagtaaattaaagaatttcagttttgaaaggganacttggatcatctagttcaactcccagtattctaactggaaatatttaggccaattatctaatattttcttttcatctctgagcatgaattttgaatcttgataatcaaatgttgataccaattctgtcttcctcctttggtaatcttaagtaatttttaattctaactttggacacccttaaagatgctttcaaattatttttgaccacctcatttctagcaagtaaaagtttatcttccaatagactcatagaatacagttgtaaaatatgtgaagcaataatacaactaaaaggataaatagacaaatccacaattttagttggagacttcaacacccttctctcaacagttgatagaacaactgaacagaaagtcagaaaagatacagaagtgatctacagaaggagcaggattggaaaaaaagttttttaaaaaagaaaggatatggaagtgacgattttacacgtgtgaagaactgacattttacctttggacttttagaaatatttgattttctagacatcgcctgaatgttattttgacttccaaaagatctcacggtccaggcacagtggctcatgcctgtaatcccagcactttgggagggcgaggcaagtggatcacctgaggtcagaagttcgagaccagcctggccaacatggtgaaacctcatntntactaaaaatacaaaaactacccgggcatgggggcatgcacctgcagtcccagctactcaggaggctgaggcagtagaatcgcttgaacccaggaggtggaggttgcagtgagccaatatcgcgccactgcactccagcctgggtaacagagcgcgactccaaccccccccccaaaaaaaagatctcaaaaatttactttattcttgttcttagcaatgttgttagtgccttagatttattcatctattcagtcattcaacaaatattaatgcctactatagtcaagccattgcattgggcattacaattgattttattatttttgaaatgtttaataagtaaattctatagagaagaagctatttaacaatagcgtatagtataaataaaataaactatttttaaaagttgtaggactatattagtctgatcaagctgccataacaaaataccacagactgggtagtttaaacaacagaaatgtatcttcttacagttctgaaaactgagagtccaagtccgaggtgttagcagggttgatgtcttgtgaggctcctctttggtttaaagacagtccttcttactgtatcctcacatagcccgtcctctgagtgcaagcagagagagagatctcttcttcttataaggccatcaatcctatcagattagggccccacatttatgatctcttttaactttaaaacccatctctaaacatagtcacattgaaggttagggcttcaacacacaaatttggaagnggacacaatttagtgcatatcaaggactaaatcagtcagcaagcatcctttacttctttcagagtttctcctctggagagaattatggaattatagttctcaccagcacccattgttatatgtaagaaaaaaacaaaatttgggagagaaaatggctttcctgaagatcacagagtaaacgggaacagagacagtagcaaaaaccaagtcttcggtgcactctccttttggtctggccttggctcagagagttactgctccacagcatacaataaagctgcagctggctttagtagatgtttgtaccatgcactccatggactcttcctattaatcctctgctcaaatctccctcctcacacttatcaaaatatcacatcagcgctcctgaccaaaatctctgctttctcttgtgagtactgagtttatcagaaccaccttggggattttcttatccttcatgatacaggcccagtatgatctgaatatagactctgtataatcttctgccatcagggccaacagataaatgactcctctccctatactatctctgtcatttggtggggatcattttttgcattagagaaggttcgtcaaggtcgttgctncttccagattgtgggccctattgaaggtatttcctctccactataaaatgtatttgcatttcctcccaccacctcaggctctctgtcctcataacttgagggctaatttgctacaaaaaaccttgaaaattaaccagctaacctggtcaacccaccattctctctggctcaacctttcccacccaaaaaaaacaaaccccttctctaagggccaggactttattaccactcacagcaaggtttttgtttgtttgtttgttttgttgttgttgtttttgttgttttttgttttttaaacagagtctcactctgtcgcccaagctggagtgcaatggtgaggtcttggctcactgcaacctccacctcccaggttcaaaaaattcttctgcctcagcttcctgagtagctgggactacaggtgcatgccaccacacccagctaatttttgtatttttagtaaaaatggggtttcactatgttggccaggcttgtctcgaactcctgacctcatgatccaccccccttggaaaaaaaaggtgctggaattacaggcgtgagccaccgcccctggccttaccacaggtattttaacatcaggcagatgtacaaagatattgtcccagtacaacaaaccaggcagaaaaatcccctgctactgggatttctccctctctctcttctttctttccccttgctctttcttcttttttcttgatcactttctttgccaccgtatggcccaagatgccagaaaattagttgattgatcagttggtgggttggttggtttgttgactggatggacttttctgagtatgatgcttggttcatcaatacaagaatcacagaacctttggattgggtttttaaaccctagctgcacattagaagaacttttataaaataccgatgtttgggccctaccttcacagattttgatttaaattggtcttggtttcaaaggctttccatgtgattttcatgagtggccaggattgagaatttttggatagagctaaaagattacgcaggcaaccattgatttgaaaattaaatcccttttactgggaaatccagaaagaagactctttctggattttctttccgaaactaagattttaggtagtattgttttcctaagaattttcctgggtataaataatttgctttgttactatagaaggaagcagcaggtaatgtttagtggtagaccagaaattcccctaaaaaatccagcagtggttagctgtggcaattcctgaagttagggaaatatcctcccaggtcagtggttttcaaatgggagaaaatttcccccaagtgaagtttggcaaattttggagaaatttttggttgttacaggttggtggaatgtcaatggaacctggtggaggcaggccatggatgatgctaagcatcccacaatgcacagaacaccttcccacaacaaagaattattttgtgtaaactgtcaatagtgccaagattgagaaaccaattcctagatccttgccctcaggtccccctaataaacccctaagagataccatccttaatgaaattagtcctaaagcatttccttttttttggagcatgatttcagcaatgtttcccaaattaaaattttaaatcctttttaagtattttttaaagtgaccatcctgctttggttttaagaaaagaaggctgctgcctgactgtgtgtgtcagagaggcagaataatcccaaggctgccttttccaaatggtggttcctttcccatttggctgcctccctgaaaaacagaatgagatgagccctatgacctgatggaggccctgccaagcccaccttgaccaggtgctgcagccagtggagctagttttcagggtgcgggtcgctccatgaaaagtggcagctgggcttatcagctgccagcctggataagtcaggcctgctgccaagttgattaataagcgctgggctgacaattcaagaagggcctaaacctgctgattttcctccccttttccttagatcatttcattattaaattaaagattgttgtgatttaaattgaactgtcaggcagcttagggacaaacgtggggtttggtgaagcagctgaacctggtactgcatttaccaaatcagatttcagctgggtgtcttctttctcttaaaaaaacaatttagaantttaagggcttgaagtagaagtagaaccttcccctgcagtgtcaggagcccacacagggaggntggcatgccaggaaagggacctgattataaatagcatgaaaagcagcatcagtcaaaantcactgatgtgcctgggcaaaatgttaaaagaaacaaatagnttttaaaaatggaagcaatggttttatttttataatttaaagtgntaaggaacaaaagcagtttatattcacatagttttaaacacacaaacatgtgtgtgcacgtgcacaaataacacacactaacagagtccctttaaggaaatgatggataatcattttaatataacaaaatcacaagtagagcctcacagagggggtagctgtcctttntttttctatgtaattgatgctatttatttagaaggtctatggtttacccttgtgaagtaatttttctgtatgtgtattttttttccagcttagatggaaaccatttgagattccaaaagcatctcagaagaaagtagactttgtgagtgtaagtcagtcccatccacacccttcctactgctctcctctcttctgtggtgagtgagccaaccatttgcagcctgaatgccaagcaaaagcagccctatcaggaggcagcacacacaaaaccacctgcgtatgctttgggggctggcggagggatgtcttacttacagaaaccatatggcccctgacaccagagggtattcatgaactatttatatctcagaaaggccaatgacaattgaacattttcttacttgccttcctttcttttggctagaacgggggcttttaacctttttctcactttgatgtctgatgtctgatgatgtctttgtttataaatatataaaataaattatataaaattacaaagaagctaatgatattgaaatataacgataaaaatactattaaaaacaaatttgatttggtttatagtcattcatgtgctttcttgttaatgtgctaaatcataatatctatgggaaaacatctaataattctggtatgagcataaatatactttgaggtatctataacaactataatgtgatatccatgatttttatcattgataaagttacaggcacctctaatactgctgtggttttttgcctacattcatattagttgaaagaaatgataaatttcactcagagattagcaaaagtaaatataaaatatttcccatccaagttcataaatctccctgaagtagatgcttgggctagaatggcgtcaattcaacatggcaactctagttagtacaatgctgattggaagctctgtttggtagttataggtcccaggagtactggaataactgcacagagcaaggagtatctgggggagaggagaaaggagctctaaggaagtggggctcaaagagaccagtggagggttctgcagaccagcctcagctcatggcttacgtagggacactccaagtgccgagccataggataaattgttggaaacatcttgaagttctcatctttattaagtgctccaaactctttgtagactcacttaaatataccctaaacttacaaattgagttaaaatacaaaatgatatccccatctcctttcttgtgtgaattgtagatatctggaggcgcagagctctctccttttggctctccatctgcaggtttggggctgagggctattttgagaagacccatgtgttaaggtttcttgcactatggatcatctggtcacacagcaganagaattacagtccatctgaatacagtcctctgccctgttccaganagattaggctgaccctatccataagcagagggctgcccatagtggagtgtacttgagaggcattaactggtccctgatgctgcaaccttcctccccaagcctcctagatgcctgatggtacctccaacagaatctcttcttccagttgatgtcaagcatcaaattgataaaataccaagtaatgaactgatactctgtaagttcttctgatatagccactaagacaacccagatttaggccatggctggagactaaggtaaaccacaaactaccaaacatgagtcagtaaattcaggctccttagaggctgcctggattccaaacgtcccaccggtcccaaagggaagacctagtagaaatgtgcctcatgaacctcagggaacagtggaaaggctgcctcttgggcaccgttcacattaacctttccctcttctgtgggtctctcccagggcctgcataccttgtgtggagctggagacataaagtctaacaatgggcttgctatccacattttcctctgcaatacctccatggagaacaggtaagtggctcagttttagggaaggacatgcccatcttctaagggattttggccagaagtcaaactccaggtttcactcttgtgaagtcacatatgcacatacatagttgtttttgttattggttttctcctcaaggcaatattcatatatatttattgacaatgataatgaatgagacaaaaggcatttatcttgactgaacatcagtgatataaacaagcacatcacataacaatgtnaacagaaaagggaggatggagccctggaatgcaggagtagatcnaaaggcattttgactttaagtctgagtccaaatatgcttttgttgttgtttgatatttcaaggatttttctgagccaaatatgagtgaccaatggcctgcgacacagccatcaggagatcctgagaacatgtgcccaaggtgattgggctacagcttggttttatacattttagggaggcataagacatcagtcaacacatataaggtgtacattagatccaaactgtggtttttatctcagtagaaaagtaacagcagatttaaagcaggcagaaaagaaaacagagaaatagagaacttagaaactctgtagttgcaggttgacctttgggctctgaatgatacaattttcccattggtttaaaatgtgcacaacagactgtaatatgtaaccagctggagtactagaaactctggcatacccttgaacttttccattttacacaaacacttgcaagtagaggcacctttctccttgtctttcctcattcttagattatttgtttcccacgttttttttcttaaaaggaggaactgagctgtgacctaggggttttgtgggtggtggattggtgtactgaatgtaggcaggactccacagtgtttcaccaccgagtcgtttccaccctcttacctgtctcagtttctctctccagagatctagcacctctgagaggcctcaaaatgccaagtgatcagctcttatatgtatttccgggacaaaactatttttgggggggttccctgtagggccactgcacatcacaggggatgaatccctcagacactgcaactcagcccctagtcacccagggtgcctttcagttgggaagaacaaaatgccctttctcttcagagctgaaggagctcagtctctcatttatgcacaaaaatgacagtcacacgaatgcgcagcaaagccaactggagctaaaatttggggaggaaaaaccaatgggaggagaccaatttagaatacacctccaaacttggaaacccaaacaggtacccaaaaagggagtcattcttgttgtctttagaaaaagacaacggaggccgggcacaagtggatcacgcctgtaatcccagtactttgagaggccgaggtgggcggatcacgaggtcaggagctcgagaccagcctggccaacatagtgaaaccccatctctactaaaaaatacaaaaaattagccgggcgtggtggtgggcgcctgtaatcccagctactcaggaggctgaaaaaggagaattgcttgaacccgggaggcggaggttgcagtgaaccgagatcatgccattgcactccagcccggacaaccgtgtgagactccatctcaaaaaaaaaaaaaaaaaaagaaaaagaagaaaaagacaatggagaaatcctttagaatggacctgtgaactagaattaggaacctaaacaagagcttcctaggagggaaaaatcaagaactgtcaaccaaacagggctcaggaggacttaacagttccatcagagganaagcccaaagttgaaggcactttcaataggtccctgctgataccttagctctgagttcaggcaactccttcagggttctgagtcttctctgaggcccaatgtgtccaggtgccaaattattgttgacaaaaatagtcaaactattaatatgtaaaatatttgaattgatgtattctgagccaaatatgagtgaccagtgacccatgacccagccctcaggagatcctgagaacatgtgcctttgaatatccttaatttctaaggttccccagggctgttcttgagtcccaggtcacagtgtgtgagtttccattaggaccacccattagtagcaggtaacccgactttggttcagctaacagctctgtgtaagcttaaaatttttaagtagaggagcttatatactggctttgcaaaacaaagtatgcaaatggcattcctgccttattatacactacctctggaactggaccatttgtgtccaaagcccaactttacatttcctggctgagcgaccttgtgagccatgaatcagggacaagatcacagccctatgacaaggctctggaggcctctctttgggtcaaatctcatatcaggccactccctctctccacttgagccgcattggccttcattcacttctttcaagctgccgcgtgccctctttaagcacttgcacttgctgttccttctgcctggaacattctttcctttctccaaaccctcacctagataacaccttcagatatcaggtcaaatgtgtccnttctttgaagaaccttttgctgattcttcaaactaaccaagtcgctattctttcattccctcaaacttgattttcacagggtcattacagtctgcaaagatattgttctgtaattatttgattgctctctgactccccactagactctaagttccacaagggcagagcctgggtcattttgctccccattttatacccagctctgagcttgcnacataggcactaaacaatgatttgtgttatgacgtaatttgtctagacaatgttaaaactgaaaatcacaagaattactgtatatgtttcagatgcttttacaattcagatggggacttcttgattggtgagttctgaagacttcagaccccctcactgataattgacccctaaccgcaagctgctttctaattttatacacattattttccttcattcttcaatctgtcttatttcatttagtgcaatccagagactgaggtctagaggccacaggtggtctggaaaggttctagtgtcctcaacgcccctactctattcctggctctctgtctttgcccatctcttctggacctttctgatgtgggagcctgggcagctgaaaagaaatgaagactaatactaatgggattaacttattacggtaactgtatttgccttgaaactctctcagtaaaagcccatttatcattagtaactgcaatttaaattcaaattttcatgagaccatctaaaatgtaaagtctatcagagattgttctggtctgcctattatacttgatggttttttagtatcaatattttggaatcaacattttcgtgtatatgtcacacaagcaaatgtcagcctttcactggaactatcagaaatgggtgattttccatcctatttctgctacccctttttgaccatgtcacaaaattgtgcatatacaagttccttgcctggtgaccaaaaaagcagagtcattgttttattcacattcttctagataggaaaatagctaatctaagttgtcagaatttatctttttccccaagagactcaataaagctttttgcatttggaatggaaaagcaaatgcagccttaagcctttcctgttcatgaaatggttatcacaccaaaagaattgctcaccactgccctgtctttttttgtcagttccgcagaaagggaaccttctcatttacaccgagtttggcaagatgcttgtacagcccaatgagatctgcgtcattcaggttggtgatgtgtccccttctcttccctgcttctcactaatttgggagcagtcagatgtttcagctgctgctatttccaactctaaaattcgtctgtcatgtctggacaacgaggagggaatctgagttatgcagaaggttccatgtgctgaagagtaagcaagcttgggtgcctgctttcttttaatatagcacataattctaaaggaaagaccacttgtcattgcactttcctaaatatttacatatactttggataaggccctgttcccactaatggcagtagaggcagtgaaggtggactttttttttttttagtgtggctaaatcaggcttaccattatctctggacccaatgagagggtagactagaattggcttgggtcacatgtgtgattaggaattcagtttttctttttaaactgaattttaaaaatttctttttaaaaaaattcagtttttcatgtttgctctggtcacctcccaagcagctcaacaaacaagagctttacttttgcatgtgggatgggctatggctctgggcagcttctttataactacagctgtgatttcagagggcacaccagtgtctgctttccattccagagaggaatgcggttcagcatagatgtctttgaggagaccaggggctacatcttggaggtctatggtgtccactttgagttacctgaccttggaccaattggtaaatcttcattacaagcctctaagcctcgcttgagatgtaggactcagataattgcatgaaagttaaacatccttctcccttcgctgtctcactcaaacttccacttttctctctagacaaattcttctctagaccaagtgtcttcccagaaaatatatgcaaaacagaaagcaacccaaaccaatccattataaatctctctagaatagtatacagacattggagataaagacggcatgtaatagatttctggttgcatagtgtgtacaggaaagaatatagaagtttgggttactgtgggcttgggtcaccagaaacagctccacagaagagatgagaatttgactaattctttatgaaaagttgaggagagtaaagaggaaagggaacagctttgcaaaagcatataagtgagaataagctttgtgattaggaggaagatatttttgttaagtcagtgagatttataatggattggtttggattgctttttgttttgcatattgtataaaatgggaaggccataaaaatgccctgggctgtattcctatggaaaggagggatggactgggtgacacatagtctatgaacctctgtgtacaccccaccaaatccacacacttagcagtcaaaaaaacacatcactcagtgctatgagagatctagaaaccacaccccaggaggcagattaaaacattccaaagtgaaccaaggtctccacagcccccattcttctggcaagctggaggaagtgaaaatgttaggaggggttgttctcaaactgtctcttggattgaaagaaaaggctgggaaaattggcccttggtttactctttggtcacatctcccaattctcccttccttgtcaacagctttttagagcaaacagggacaggccagtgtgtgccttctggtcagctcctctgaggaatccaaatatgcagaggaaggtgggaggcagcaagaggcagctggagccgtggtgggccgtctgtcatcctgttcacctcccactcttcccatcctgctctggcttcctgctgctctatagtcagcatagcctccaggttccgtggaacatgtaccctctggaaaatatctataatttgctaaccagccggggacttatttttttaagtcccaggagctggaaatgataaaacactcctcagctcgctcctctcagagttaaactgtttttgcacttaagtttttcatgtttggtcttttgatttatttcctttctctggaggaaacactcactcctaagcaaaggtaagcaggcaggtcctaaatacttcttcctgagtggcagacagggtttttcaggctggagaaccgttttcagactggaatctgagttctgtctagggagcagaggcatgccttaggcaacagcgtgtaaccctttctatctgagatcaaggactgtcaatgacttctagaatattcaagggttccttcaaaagaaaaagttctggagttctatcagatcttcccttttcctcttttcagttctctttctctcttcccttcccctcacctgtagtgataagataatgcatataagattgttttgttaaccatagtcactccacaaccttagaaagtaatgctggtttttgtgaatttttttctgaccagattccttgggtcttcctaaaaggtaccagactggaaatgcagtgaatctttgagcaatgaaagcaatttgtggagtagctcttgacatgaaagaaagcctttctcttcatgcaaccatgggcatctttcctatgttttggaagtttctaaaagacttttgggttactgttttctaggggccaatggcttggccaatcctcgtgatttcttgatacccattgcctggtatgaggatcgccaagtaccaggtggttacacggtcattaataaataccagggcaagctgtttgctgccaaacaggtaaagtaaaagggttggcaggcaagggaggaaatgaagagtgattgagcacttactgattgccaaggcgagtgttacaaactttacatatatcctttcgttgttatcataccactacggcactacaaataaagcaaatagttctagtagtcaattatactttcatagtcatggaaaaggcagtaatgataaataatttaccaatttcacagtaagtggcagaaccagaatttgaacccatatctgtctgactccaaaggttgtgccctttctactcaccaagcaatgaaaatattagcaatatgtaggtttctataagtggtatggaaaacataatatatgggcagcataatatgttctgaaaagtaaatgagttaacagatcagccaagatttatagtctccaataccaccctatttcaaatacaagcaatcctacaaaacaagtagaattcagttaattagcttggcttggtttgtaccaccaggctggcaattcaggacacaagcaaaggcacagatattaataaataataataacaacaatgtaatatggactctataacataatatattactaaatgtactgaatatatattagaataaaataatcatataataagaagaacccaaagatctcttctgtttagcattatttgtttgcttcattttgtctatttgaattattccttatattttccaaggtatgttattcttcttaggcagcatctagagataatgccaaccagccgaggccaaccagtttggcacttaaaattaacccctgaagcagacatattgttattctcttattctctgggtcaaggtctctcaaaattcggggggtatttgcatcagaaatcctcaaggaggcttgtttaaaattcagatcctaggctgggcatggtggctcatgcctgtaatcccagcagtttgggaggccaaggcaggcggatcacctgaggtcaggaattcaacaccagcctggccaacatggcaaaaccccgtctctacccaaaatacaaaaattagccagatgtggtggtgcacacctgtaatcctagctacttgggaggctgaggcaggagaatcgcttgaacccaggaggtggaggttgcagcganccaagatcatgccattgcactccagcccgggcgacagagcaagactccctctcaaaaaaaatgcagatccttagatactactctagccttgcaaaaaatgataagctttggagatgggacatggaaacctacattcattttaagcatgttccccagatcattgtttacatacaattgttaaagaaccacaattgtagaagcagccagtagctcctccgaaaggtttgcactttccaagtggaccctgtgctggttattttctgtgtgagtcccactgatccattctccctctttgccatgatctgtgccctggaagttgactgtatcacccgggctccctaaccactggtttctgttgggttcaacccacagggaaactacaggcaggaagaaagacaaattgggatatttcttcccctgcttcctcgctgtttaagaatgtgtttctgacagtagctgcatcccccatatgacctcagttcctgttgggtaaccctagtggtgggctggagctgattcatagtgacttgcaaaagctgatatgcacgcttctgtccaactgtgtatttgttgatgtcatactggtagctaaaaaatcatcatggtgagactgtatacaccttagaaatcagtaaacactatatgtcaatgctttatgtatttttttcagagtgctagttgtgaaatatttaccagcacaccactgggtaacacccttctttataattctagctcttgctaaagtcctataacaatatttccctcctcattccacatgcccaggaatagcagtgtcttcccgctattgctaggctcaaatacctcaacatttctagtcattccagttaaccctaaccacgcctctatgagtaacgccttcattaaaatctttagcacttttcggaccatagatacgtttggacctcctttcctatagcaggacactgattctcttctaccccaggacagggaccagggaagtattatgttagggattgcttctgaaatctcaagtcttgggagttgggaacttttaggaggccttcttcccttcttcctggactcaccaacccaggcactgtgtctattgcaagctcctctaggctgaaattacctggagaagcatcacagcaggtactctctgttccaggaaacagaaggtagcccagattgtttgagacctgctgacaatccacagatcctcacagttaggttaaaaattgttgaaaaggcactacttggagaatgtgctgtgtttcctgctgcatgtgtgatcagaaggcagctgcagcttatgaaccagaaaaatagggttagtggctaagtagagggtgtgtggagcaaccacaaaatgattcagggttatacttctcccaaaggacggtaaaattaaatcgagaacaaaatcaaatcaaaagaagagagaggtatactcagtacatattgtgggatcacagctacaaaagcattagatggtaaaattatcctttcctgctttttgtgtttaggatgtctccccgttcaatgttgtggcctggcacgggaattatacaccctacaagtacaacctgaagaatttcatggttatcaactcagtggcctttgaccatgcagtaagtctgaaccctgtaggggccttgggatgaggcaacgcttgggtgggaggggtccacagtagacccctgacatttacagatctaacatttccaatgtcaccgttgggaagccctaaatatagtcatttgtcctttggtgagggagtaaataacacaactagtagggaagcaaagccagatactcaacattcccctgtgaaacatagcttcattctctacagagcattggtgatactctgacttgtatttgccaaactaagtggataaacacttagtttctttgtggaaaatttatcccccaaaacaaccaagtgttaatgtcggtggtagaatgaggagaaaggaactttatgaatttggagaagtccctgaccccacaactctcaagagcctcctctatgatctctgacttctcaccccagtgccttcattcctggctgtatttggcagtgacagagtgaacagcccacttctaaagttactcataactttcagtgcttgagtttaaaccaaagaaattctagagcatgaacttggtcatatttttcactcagttcgcaggccacaaatggtctctggtctacagtgcaggctcccaagaccctacattcttaataaagtggtggttctgagaccccggggggaagttcattttgcagctcacttcataagagatgaacctaacccacaagctggaaggataattagagcagaagtcagagactcagaggcaaaaggattattgtgagccagttcagtttatctctggggggacaaacctacctctccaaacagcagcaactcttaataaaagcaaaggggaaaagaaaagtgagacatcagaccccaaacaaacagcacgaaaaaggatcctgagacactgataaagctttatttgtgattcactacctttgctttaatagtttcagatcatgtcccatgacagttgaagaaatgtcaattctcacagcaataagggttgggtttatttttatttgaatttacacagatgcgatcttctctgtatttgctgcaatagttatttttccaaaatttagttctgatcatgccaccactgtctccattagaaagcctttgcaggttcccatgggcttaggattaagtctgcactctgaaccatggtgtttgatgctcttcaccatctgtcccaccctggaatcattttccagtatcacctcttgcccctttcccttctgtcaaagcattggggttttagccttctctcctcttaacaaaatttttgtgcactttgatgtgttttcagtgattaaaangtcatttcccttccttcccanttccttagtcctccctccctccctccctccctttttcccccatccccggccacgtccttcctttctttttttttttttaacttttattttaggttcaagggtacatatgctccttccttccttccttctttccttccttccttcctttctctctctctttttctttctttctgttcattcttgaagacctacctcaaatgtcacctcctctttgaagccttccttgacctttcaggtagaattagctgcccaacccccaccccacaattaatgctaaagaagcagggaatcgatccccatgatctttgaatctccagactcttacatggcatctgaaagggaacatgattgttgatttcaattaaattgaatctcaaccttctcactaaagaattctgaagagttttaaaaagtataatttcgtccctcaacctatcctatctctacactaccactatgaagactacggatgtaaatgctgtgttttagacctgaaagtcaaacaaaggtaggaaagcaatgaaccacttctcagacttttctgccaatggatacaatctggaatctccgtattctcccaaagaggagcacatctacaccaaaacttggattttgctttatttctatttctactttgctctgagcatcccttctgctgcacatctcagctctagtcaacttgatctgaggttgagaagcaggcaccgttggttctcatacccacggggtaataagttgcatgtaatgtgggctcagcagggtgaaaaagcagttcagaatccttttagctggtgttaattcattttgcctcaagcacagcaagaggaaaaagtcatatgagtgattattgcaccttgatgacaagcccagacttctgttgtttgatcagaaattaggctgtccgtttgcagcaacatggatgcagctggaagccataatcctaagcaaattaatgcaggaatagaaaaccaacttctgcatcttttcacttataagtgggagctaaacattgagcacccatggacataaacatgagaaaaatagacactggagactactagaagggggagggtgaaaaaactacctattggatactatgctcgctacctgggtgatgggatcctgtattagtccattttcatactgctgtgaagaaatacccgagactgggtactttataaagaaaaaggggtttaacatatccacagttccacatggctggggaggcctcacaatcatggtggaaggcgaaggaggagcaaaagcatgtcttacatggaggcaatcaagagagcatgtgttggggaactgccctttataaaaccatcagatcttgtgagacttattcactatcatgagaacagcatgggaaaacctgcccccatgattcagttacctcccaccgggtccttctcacaacatgtgggggattatggaagctacaattcaggatgagatttgggtggggacacaaccaaccatatcagatcctaaccccaaacttcagtatcacacaatatacccatgtaacaaaactgcatatgtatccttctatctaaattaaaagttgaataaaaataaataaaaaaattagaatgtcacttgcaaacacttcatgtatgcatgaaatgtgtgtcattgtccagtcacttcccttgcatcatgcgttcagtctctccttgtgtgttcacaggacccatccattttcacagtattgactgctaagtctgtccgccctggagtggccattgctgattttgtcatcttcccacctcgatggggggttgctgataagaccttcaggcctccttattaccatagtaagtctctcttttaccaagccacatttgcaagccaaagagacaacaaagcagtgagcgctacacattgggaataatgcctgggttatttctggacacccaccatggcatgaattcaggatcctgctgcacaaggcctagtgctgatccccaagctttaatctctttaagggatggtagttgtgttagtccattcttcgttgctataaaggaatacctgaggctacttaatttataatgaaaagaggttcatttggctcgtggttatgcaggctgtacaagcagcatggtgctggcatctgtttctaatgaagcctcaggaaatacaatcatggtggcaggcaagagggaagctggcatatcacatgatgagagcaagcaagagaaaggaagaaatccccagcttccttttgaacagccaaaccccatgtgaactcatagagtgagaaactcactcataaaccgtcatgatggcaccaagccatttatgagggatctgcctccattacccaacacctcaanccaggccccacctccaacactggggatcacatttcaacatgagagttggagggaacatacatccaaactacatcaacagtgatgcattgattctgagcctagttcccagtttctctgtccctgtaagaggcagaaaggctggtaaagtttagaagccttgttagaaaggcttctaaacaagtttcctcacattttagatgtttccttttggggaatactggggaggttgttagttagtctgttgttttgggaaagttcatcacctaagtctggttcagagaaccagagaaataagaagagagagacagagagagacagagagagagacagagagacagaaatgtgccttctccaattattttggcagggcaaagcagactgcagaacatttgttgcctagtacaagaactaacaaatctactatttttattttattaatattattattcctaccccttataattattggccaatttctatggcctgttccaagttttttaaaaacttactcatgaagtgtttataatcttgtaagagacaggtagtattattgtcccccccgctttttttttttttttttcagaaaattaaactgacacaagagggattaagtaactctctcaaggactcacagcaagttaagtgtagagtcaggatttaattgcaggctgtctgataccagagcaaacactcatgaccactaactggtatggctagcatagtgcctgatatatagcatgcttttaataaatatttatttaataagtgaatgcatcaacaagaataaataaagtacttcacggctgtacttaatgaggttgacatttttaattgtgcaatagctagctgaaaatccaatcaaaggtcaatgtgcaattctacttcctggagtgtgcatttttttgtgcatagagttctggaaagactctaagaggcattccacctggaacattctagaaaacaaattcctttctttagtaaactccagggccttctgtttataataggtccctctctatatataccagttcccaggtgtcagggctcaacagaacacaacagtgcactgaatggccaatttagctattttatagcatcaggaatgaaggcccttaggatggacgtaggccactccatggtcaaatgccagcatcccccttttcagatggcaccatcatggtagagaaaagaaaacaatcagttaccatggcaaagacggcagctattttgtgaatagcatcataagtcgtttctaaaaactgtgaagcctactaaagactctaacttttctcctcctggaagttagtgacctagaggacctgttgtcaaggagagaaaattgccctggcttatagtccgtacttcgcatgttactccttaataattcaccatttcactcttgttcttgtattgaggttactctgtgtgcctgtagtggttcttacattttaccatgtgtcacagtcagctggaaggtttattaaaacacagattactgggctccatcctcagaatttctgcttcagtaggtctgggataggacctaagaatttgcatttttaacaagttcccacaagtgatgctgaatctgccttttttttttttttgagacagggtctcactctgtcacccaggctggagtgcaggtggcacaatctcagctcactgcaacctccaccccccaggctcaagtgatcctccccgctcagtctcctgagtagcttggaccacaggtgtgcaccaccacacctggctttttttttttttttttgtattgttagtacagacggggtcttgccatgttgcccaggctggtcttgaactcctaaactcaagcaatccacctgccttgacttcccaaagtgctgggattacaggcatgagccaccatggctggccagaatctacatttttcactggcaagtcaggggattctgatgaaggaagtttacagactgcttgttgaaaaaatactggcctaggtgtgtcccatccctaggtggaagaataatagaggtccatctgatttagacaagttgctactgtgctatgggtctcaacccatccttaatttttatttgtagttcagactcgctgacacaaataatcttgagagatgcctcctatagttttttaatgactcncaaagtaaatttggccccagggtagatcttataaaggtatgggtaccctgagttcgttgggaaaaaaccacagaaccccaggttagaaatgagttttccagagatattaaaaatattgccttggcaatacncaaaatctttgctgctttgatgtgactttattataagagaaaatggagaattatttctatagaaatattgcctccagtcatcttaatgtgccttagtcaactagattcagctttttttttttttttttttttttggagacggaatctcatctgtctcccaggctggagtgcagtggcgccatcttggctcantgcaagtttgcttcccgggttcatgtgttttcctgcttcagcttcctgagtagntgggatacaggcgcccgctaccacgcccggctaattttttgtatttttagtagagacgaggtttcaccatgttggccaggatggtctcgatctcttgacctcgtgatccacccgcctcggcctcccaaagtgctgggattacaggcgtgagccactgagcccggcctagattcagctttaatcagaaaggcaaggtctatcctcccactgtcctttgaaatatagaaaatgatatagaaatgtcatcaccaagctcactgctatctaaattcatattcagatcaaagctgaattctgttttgctctcttcttaaaattaagccatgaaggtgaccctgaggacacatactagagcaaggagcttgacaccaaatttaagtcatgagctgaactgtttttaaaacatagacaatttatgcttacatttgcttctttttctgtatttccacttcatagagaaacaagtagaactatgatctgggtctcacctcttcagcaggagctcacacactctcactcactttgtaggggcctgcagtagctttctgtttctgagcagggtgggtgtggctgcttagtcaattataaaagcatttggcacttggttatacttcacatgtaagcaagaagggcaggcatgtatcatgtccagtgtttgattttgtaagggttgccactgccacatctctctattctgtccttggtttgccctctcagtactctcacaggacagactatgagtagctttaaaggctatgttgttgttgttgttgttaattattcttttttaagtagctttaaaagctatttcttattcatctctgtctcatgttagccagcacatatctaattatatgtgctggctaactggatgggcagatgggtgaagtgggaaaaagacagatgaatgaatgggtaagtagatgtgtggtttgagatgcaaaggcacttaaatttgcccaggtgttatatttctttaattcctgctctattgtattgctactctaataaagagctttatttcaatagaagcataagattggaagagtggaagcatggtgatttttgttaaattttgtgtgactctagaaagcacaactaggaccaatgaatttaactcatataaaagcaaatttccatttaatataagaactttcttacacacagagctcttcaataatatgatatgctttgtagagtggagagcttccattcacatccaggcagagcccgggaggtaatcagtcaggaaagatatagaaatttcttctacattgagtagaagtaaggataccttccaatttcaagatttaggactctatgaatagggtatcaatggaactagaaaaaataaaaacaaatccaaaagacattctgaagaacagaaaaacaagaggataacagattcatctatagaagataatatttgttataataaatagcatttatggtctgttttatacacataccaagattctttcacacagattatcatttgataatggactttaagtctggggttcttttcattacattatcatctatcatccatcaaaaccacacaccctcaatctaagccttctagattgggaattagaaatatgctgttgctgtgtcctacagtggagctacttgggaaagggttatgatttgggagataaagataacttttgataacagggttcgtaaagctttaggatgatagagaacatttcggttttctattatgactagcattttaattattattattttttttggcccctgattttttttagatttagcctgattcctgtcagagagtggaactcgagacctctgataatccacatggccatggagtagagctgtgcctgccaagaatgccaatatgaatgttttatgattgttcttctgtcaatccatattctttattaatcctatacaatttactagtttctcctgtgttcttggaattctgcagaaataatgtttaaggggctttgtgttttactggtcttgccttggataataaaaataatactgcttcaaccttcccagggaactgcatgagtgagttcatgggactcatccgaggtcactatgaggcaaagcaaggtgggttcctgccagggggagggagtctacacagcacaatgaccccccatggacctgatgctgactgctttgagaaggccagcaaggtcaagctggcacctgagaggattgccgatggcaccatggtaagtatgttaactgccacattccagcggcctctgaactccccacccttactgagaagggttgccgtttttcatttctccaaagtcacagaggaagaatcaaaagaaggaaagttaatgactgcataagtatgtttacatgtatatatactcacatccttgtgtatatactagacttctgttgtggtggtgtaggaaagatcattgggacttgggagtcagacctggttctggagtttaagtcccatctcttagttcctacaggatcttgaacaactcaacttagcttctctgtgcttcattttccccatctataaaatgggtatagtatccaacccagcagatggctatgagttaacctaacagactgtccaacactattcaaatgtaagggaacattattaatactatgtgaagcctcttcctgtatccttatgcagccctgggcatatgctatgtctcagagtcttctgcgttttgaagtaatcctccagggccacagtagtagcggaggcaggatctcaccttcagcacgtgtttcaagccaaggagggtcaaaaagcccttgcctcactatagtcagggcttgtgagaagcaattctcagctgttttttgcattttcctttgctctgctttggcatggatgcaactgatgggatttaaaacctgttttgtattcttcctgtgtcaggctgtaaacattgaggctgaacacaattgcagctggctgcggtgcttgattttattttatttttgcattcttcgaggtaaagtttatggtccacagggagtaattttatgctaaatcacatgcaaatttgctttacttttgaaaataaatgccttcaatgctacctggtttaaaatctatagcaaaaacctgcctgcttcatgcttgcaaactacctaaacagtgagcattatctgtccgtctgtccactgcagtttgctttcagtcccaaccctggagccagagttggtggactcctttgcaaaaggaggtgttcagagtcccatttgcttgctttggctctatttcccctttcaagggcctctatggagtttctgtaaaacccctacatctcaaagagatgcagtctggcagtctcagttaaactattacctctgaaatctcctggaagtgcaatcctggaagctattctagagttgccactcaataacctttgttcccccaatttggctttgggtagtcaatgttatgagggagctgtgttttacaacagtgaggcgtaggacagggctgtttctatgaggagcaatactttgaattactagtgagaaagagctctcctattaggatgggagaccctgggtatcaaggagccagaatacctgatggcggagggtccaacatcttacctagacctaactttcagtcgtcctcaccatttcccattatataattcagacccaggtctatctacatgccttatccttattcttgtttggagtgattaacttggtacaatagcatcttcaaagtcagctgggatggggcttttgttaatccagccaaatggagaggcttttaagaagcagtcagcaaagagacaatagcaatggccataatgatccttgtatgtgaatagtgctttttaaaaatctttattacttattatttattatttttatggatacataataagtatgtatatttatggggtacatgagatatgatgatacaggcaatatgatacgtaataatcacatcaagataaatggggtatccattacctcaagcatttatcctttgtgttacaaacaatccaattatattctttcagttattttaaaatgtgcaattaaatttttattgactatggtcaccctgttatgctatcaaatgctaggtcttattcattttttttcttttatttctttatttatttttaacttttatttgaggttcaggggtacatgtgaagatttgttatataggtaaactgatgtcacaggggtttattgtacagattatttcatcactcgggtactaaacagtacccaatagttattttttgtgattctctccctcctcccaccctctattctcaagtaggcatcagtgtctgttgctcccctctttgtgtccacaagttctcatcatttagctcccatttagaagtgagaacatacaatatttggttttctgttcctcttagtttgccaaggataatggcctccagctccgtcgtgttcctgagaaacacatgatcttgttcttttttatggctgcatagtattccattatctgtgtgtgtgtgtgtgtgtgtgtgtgtgtgtgtgtgtatgtgtgtgtgtatgtgtatatatatatatatatatatatataaagctcttaagtttaattagatccatttgtcaatttttcttttgttgccaattgcttttgatgtttttgtcatgaaatctttgcccatgctgatgtcctgaatggtattgcctaggtcatcttccaaagtttttatagtttggggcttaacatttaagtccttaatccatcatgagttggtttttctatatggtgtatggaagcggtccagtttaaatcttctgcttatgactagccagttgtcccagcatgatttattgaatagatagtcctttccccattgcttgtttttgtcagcttcattgaaaatcggatggttataggtgtgcggccttgtttctgggctctctattctgttccattggtctatgtgcctgtttctgtatcattaccacactgttttggttactgtagccttgtagtatactttgaagttgggtagcatgatgcctcctgctttgttctttttgcttaggatagccttgggtatttgggctcttttttggttccatatgaattttaaaatagtctttcctagttctgtgaagaatgtcgttggtattttgatatgaacagcgttgaatctttacattgctttggatagtatcgtcatcttaatgatgttgattcttcctacccatgagcatggaaagtttttccatttgtttgtgtcttctctgatttctttgagcagtgttttgtaattctcattatagagacctttcacctctctggttaggggtattcctaggtattttattctttttgtggcagttgtgaatgggattgcattcctgatttggctttcagcttgactgttgttggtgtataggaatgctagtgatttttgtacattgattttgtatcatgaactttgctgaaagttgtttattggttgaaggagcttttgggctgagactatggtgttttctagatatagaatcaggtcatctgcaaacagggataggttgacttcttctcttctggatgcactttatttctttctattgcctgattactctttgccacgacttctaagactatgttgaataggagtggtgagagagagcatccttgtcttatgctggttttcaaagggaatgcttccagcttttccccattcagtatgatgttggctgtgggtttgtcataggtggctcttattattctgtgatgtgttccttcaatgcctagtttattggagagtttttaacttggaagatatactgaattttattgaaagccttttctggcatcttggaatagcactggtataacttgcatagcacttccatatgatctcatccatcaagcctgtcacaggaaatcaggcagcgatactcatatccattgttttagacaaaaataatttaatgtatattagagcccaaacattaatgtgggtgctttgggttgtagcacaagataattctattattttccttttgcctgtctgtattatacaaatttccaaatgtgagcatataagaattgtagggtttggtttttgggttttgttttgtttttaaagccacagtggataagaaaagtcagcaattgatgaagctgtaatgtctaagatgcacagagtatttacatattctttctgttgtggacaaaaacctcctgacagtgcaacatccaccattcagacacttctgagatatgacttttaaaagtgctacagccattcctgcaatttccttcacctccctctcctcacccactccctttttcccttttcccagcccatctcttggtcagagtcctgaaaagacaggctcaaatcccagttctgcgatgacttgtcgccttaagcaagtcgtttcccagctctcagccttaattcctcctctgcaaaatgggaagtatgactttcctcacaaggacatagccacagtaagtgaagccctcagaagatggatattcccaggattctcccatgtctgcccttggatctagcagacttagttccgtaataccatgaagataatttgaggttaagggtgaattttattttacagaatgaaanttgaggccctgagaagttaaggtcttgtaccaggtctcaccagcttacaaatggtaggaccagagccacaactcagggcttgagcctgctctcctcaccactctagcacacaaatctttgatttgttattggaaaatttcacctacccataccttctgttgacatctaatcaaatgtgtttattatctatctcacctcttttttctcatccccatcgtcacttcctccaggcatttatgtttgaatcatctttaagtctggcggtcacaaagtggggactcaaggcctccaggtgtttggatgagaactaccacaagtgctgggagccactcaagagccacttcactcccaactccaggaacccagcagaacctaattgagactggaacattgctaccataattaagagtagatttgtgaagattcttcttcagaatctcatgctttctggtagtattggaggagggggttggttaaaatgaaaattcacttttcatagtcaagtaactcagaacttttatggaaacgcatttgcaaagttctatggctgtcaccttaattactcaataaacttgctggtgttctgtggacgtagtgattggtcataancaagtcttgatgagacaaacctggcaggtcaggtcagtcttgctaagattgaaccaaggcccagggccctttgccttgtggttggcctgaatgccttcattctaggagcacaagtccaggcatatactaggtatcacaaaaccaggccataaggccaaacgttaanaccatgaactgaaactgggaggtntggcaaacctcttaggatccaatccatacatggggaaatttaggggatcatgaatgccccaaatatccacctttcaatcgatnaagaaccgggccaataggctgtctaatcctggtagtcgcttnccaccaatatga

SEQ ID NO: 6580 - DNA, 1875 bp, Homo sapiens
  misc_feature (1)..(1875): n=a,t,g or c
tgagtgctaaagcttccaacaagactgatgctagctcgtgtcaccaggaagatgctacgtcatgccaagtgttttcagcgcctagcaatttttggttctgtgagggcactgcataaagataatagaacagcaacccctcagaatttctccaactatgaatccatgaaacaggacttcaaactggggattccagagtatttcaactttgctaaagatgtcctggaccaatggactgataaggaaaaggctggaaagaaaccttcaaatccagccttctggtggatcaacagaaatggagaagagatgcgatggagttttgaggaactgggatctctgtccagaaaatttgccaatatactttcagaagcctgttccctacaaagaggagatcgggtaattctgattctgcccagggtcccgagatggtggcttgcaaatgtggcctgtctgcgaacagggacagttttaattccaggaaccactcagctgacccagaaagacattctctacagactacaatcttcaaaagcaaactgcattatcaccaatgatgttttagccccagcagtagacgctgttgcatccaaatgtgaaaatctgcactccaagctgattgtatcagagaactccagagaggggtgggggaacctcaaggagttgatgaaacatgccagtgacagccacacctgtgtgaagacaaaacacaatgagatcatggccatattctttaccagtgcaacaagtggatatccgaaaatgtctgcacacacccacagcagttttggtttaggtttatctgtaaatggaaggttctggctagatttgacaccctcagatgtgatgtggaatacctcagatacgggctgggcaaagtctgcatggagtagtgttttttctccgtggatccagggagcatgtgtattcacacaccatttaccccgttttgagccgacttctatcttgcaaacactctccaagtaccccatcacagtcttctgttcagcaccaactgtataccgaatgcttgtacagaatgatataaccagctataagtttaaaagcttaaagcactgtgtgagtgctggggaaccaattacccctgacgtgactgaaaaatggagaaacaagacgggcctggatatctacgaaggatatggacagactgaaacggtgctaatctgtggaaattttaagggaatgaaaattaaacctggctcaatgggaaaaccttctcctgctttcgatgttaagattgtagatgtaaatggcaatgttctacctcctggacaagaaggagatattggcattcaagttctacccaaccgaccatttggcctttttactcattacgtagataatccttcaaaaacagcttcaactctacgaggcaatttctatatcactggggacagagcatatatggataaagatgggtatttctggtttgttgcaagagcagatgatgtcatattatcctctggctatcgaattggaccatttgaggtagaaaatgccctgaatgaacacccttcagttgcagagtcagctgttgtcagcagcccagaccccatcagaggagaggtagtaaaggcttttgtcgttctaaatcctgattacaagtcacatgatcaagaacaactaataaaggagattcaggagcatgttaaaaaaactacagcaccttacaaatatcccagaaaggtagaatttattcaagagctgccaaagactgtcagtgggaagacaaaaagaaatgaactgaggaagaaagaatggaagacaatttaaagttgtttcattaattaccatatctataaacaaacatagtatctgtcaatctctagagcggccgccaccgcggtggagctccaattc

SEQ ID NO: 6581 - DNA, 2226 bp, Homo sapiens
  misc_feature (1)..(2226): n=a,t,g or c
aagcttaatgatttatgggtgattagctgcaagaatgcaagcacagaagacacaaacctttatgccttggaaatttgtcacaagccaaccagttgttttccatccctgtgaagcaggaataattggaggtctgacagaagaacttcccagttaccagaaggagcagcactcatgttctctcttagttttgtgtgaggtgttgcccctgccttggtcaacagtttgagtcagagagatgggggccgggcacaaatccccaccagacgttcccattcacagaccctgtgggggctgggagacgccctggggcaagcagccctggggtaaccaagggaacaaacacggaaaaccaggacgtcagtccttatctggagctcattaaatggggaacattagtcagctgtgaaggccaagatagggtgataggcctgtgggtgggctgggatggggcatgggggcagaggccgccatggaggagaagaggtattggcctcaacgaactccacctccccgccacgtgcccagatccgggatggaaggaccctataaatgcccacaacccagcctccccagaggccttgagaaagagagcgatagagtgcgagagcgagtgcccggagcatcctggccctgagacagctgggccagccccgcagggctctgcagcatgtgggagctccgctccatagccttctccagggctgtgttcgcagagttcctggccacactcctcttcgtcttctttggcctcggctctgccctcaactggccacaggccctgccctctgtgctacagattgccatggcgtttggcttgggtattggcaccctggtacaggctctgggccacataagcggggcccacatcaaccctgccgtgactgtggcctgcctggtgggctgccacgtctccgttctccgagccgccttctacgtggctgcccagctgctgggggctgtggccggagccgctctgctccatgagatcacgccagcagacatccgcggggacctggctgtcaatgctgtgagtagccacaactttgccatccacaaggggtgcccctaccccggccctcttctctgtcccccagctcagcaacagcacgacggctggccaggcggtgactgtggagctcttcctgacactgcagctggtgctctgcatcttcgcctccaccgatgagcgccgcggagagaacccgggcacccctgctctctccataggcttctccgtggccctgggccacctccttggggtaggtcatggccatgggttccagcctcccttcccttctctctttgattgccctcctcccactgcagatccattacaccggctgctctatgaatcctgcccgctccctggctccagctgtcgtcactggcaaatttgatgaccactgggtaatggctgaaaccccctgccctccccgccaagccgccctctccgctcgcccccaggtcttctggatcggacccctggtgggcgccatcctgggctccctcctctacaactacgtgctgtttccgccagccaagagcctgtcggagcgcctggcagtgctgaagggcctggagccggacaccgattgggaggagcgcgaggtgcgacggcggcagtcggtggagctgcactcgccgcagagcctgccacggggtaccaaggcctgagggccgccagcccgtgctaaggccccgacggacgcttgtgaggcccgaggcagaagggccaccccgtccctcctctcccgcagtctgaagttggccccagcgcagagtagctgcttcctggacgtgcgcgcccaggccagtgctgtgagcaggcggggaggaggctgccggaggagcctgagcctggcaggttcccctgccctgaggctgtgagcagctagtggtggcttctcctgcctttttcagggaactgggaaacttaggggactgagctggggagggaggcaggtgggtggtaagagggaaactctggagagcctgcacccaggtactgagtggggagtgtacagaccctgccttgggggttctgggaatgatgcaactggttttactagtgtgcaagtgtgttcatccccaagttctcttttgtcctcacatgcagagttgtgcatgcccctgagtgtgaacaggtttgcctacgttggtgcaagtgtgcatggctggggacttctcacttccccttgcaccccttcctccccaacctgcaataaa

SEQ ID NO: 6582 - DNA, 4565 bp, Homo sapiens
  misc_feature (1)..(4565): n=a,t,g or c
gaattccgggcagcatcatcaaggcacatagattctctctttgaacaatgcagctgctgcaggggatggggaagggatggcactggcaattcaagactgcctttcctacttcttcagtgcctctttcaccaatatgaagttaaaaccaggatccttcaaaccaaaaatgtggtggaagaaagaaaaccgtgtctttcagcagcatgccatcggaaaagaaaattagcagtgcaaatgactgcatcagcttcatgcaagctggctgtgagttgaagaaagtccggccaaattctcgcatttacaaccgttttttcactctggacacagaccttcaagctcttcgctgggaaccttcaaagaaagacctcgagaaagccaagcttgatatttctgccataaaagagatcagactggggaaaaacacggaaacatttacaaacaatggccttgctgaccagatctgtgaggactgtgccttttccatactccacggggaaaactatgagtctctggacctagttgccaattcagcagatgtggcaaacatctgggtgtctgggttacggtacctggtttctcgaagtaagcagcctcttgattttatggagggcaaccagaacacaccacggttcatgtggttgaaaacagtgtttgaagcagcagatgttgatgggaatgggattatgttggaagacacctctgtagagttaataaaacaactcaaccctactctgaaggaagccaagatcaggttaaagtttaaagaaatccagaagagcaaggaaaaactaaccacccgcgtgaccgaagaggaattttgtgaagctttttgtgaactttgcaccaggccagaagtgtatttcttacttgtacagatatctaaaaacaaagaatatttggatgccaatgatctcatgctctttttagaagctgagcaaggagtcacccatatcaccgaggatatatgcttagacatcataaggagatacgaactttctgaagagggacgtcaaaaagggtttcttgcaattgatggctttacccagtatttattgtcatcagaatgtgacatttttgatcctgagcaaaagaaggttgcccaagatatgacccagccattatctcactactatatcaatgcctctcataacacctatctaatagaagaccagttcagggggccagctgacatcaatgggtacattagagctttgaaaatgggctgtcgaagcgttgaactcgatgtaagtgatggttcagataatgaaccaatcctttgtaatcgaaataacatgacaacccatgtttcctttcgaagtgtcatagaggtaataaataaatttgcctttgttgcttctgaatacccactcattctttgcttgggaaatcactgctccttgccgcagcagaaggtaatggctcaacagatgaaaaaggtctttggcaataaactctatactgaagcacctttgccctcagaatcctacctcccatcaccagaaaaattaaaaagaatgatcattgtgaaaggaaagaagttgccttctgatccagatgtgttagaaggagaagtaacagatgaagatgaagaagctcaaatgtctcgaaggatgtcggtagattacaatggtgagcagaagcaaatccgactctgtagggagctctctgatttggtgtctatttgtaaatctgttcaatacagggattttgaactatctatgaaaagccaaaactattgggaaatgtgttcatttagtgaaacagaggccagccgcattgcaaatgagtacccagaggattttgttaattataataagaagttcttatcaagaatctatccaagtgccatgaggatcgattccagtaacttgaatccacaggacttttggaattgtggctgtcagattgtagcaatgaattttcagactccgggtccaatgatggaccttcacacgggctggtttcttcaaaacgggggatgtggttatgttctaaggccgtctataatgcgagatgaagtttcttacttcagcgcaaatacaaagggcattctacctggggtgtctcctctagctcttcatatcaagatcatcagtggtcagaatttcccaaagcccaagggagcttgtgccaaaggggatgtcatagatccctatgtttgtatagagatacacggaattccagcggattgttcggaacaaagaactaaaactgtacagcaaaacagtgataatcctatttttgatgaaacttttgagttccaagtaaacctacctgagctggccatgatccgttttgttgttctggatgatgactacattggggatgagtttatagggcaatatacgataccatttgaatgtttgcagcctggatatcggcatgttcccctgcgttcttttgtgggtgacatcatggagcacgtaaccctttttgtccacatagcaataactaatcgaagtggaggaggaaaggcacagaagcgcagtctttcagtgagaatggggaagaaagttcgggaatataccatgctcaggaatatcggtcttaaaaccattgatgacatctttaaaatagcggttcatccattacgagaagccatagatatgagagaaaatatgcagaatgcaatcgtgtctattaaggaactatgtggactccctccaattgccagtctgaagcagtgcctgttaactctgtcatctcggctcatcaccagtgacaatactccttcagtctcacttgtgatgaaagacagctttccttacctggagcctctgggtgcaattccagatgtgcagaaaaagatgctgactgcttatgatctgatgattcaagagagccggtttctcatagaaatggcggacacagtccaggaaaagattgtacagtgtcagaaagcagggatggagttccatgaagaacttcataatttgggggcaaaagaaggcttgaagggaagaaaactcaacaaagcaactgagagctttgcttggaacattacagtattgaagggccaaggagatctgttgaagaatgccaagaatgaagctatagaaaacatgaagcagatccagctggcatgcctgtcctgtggactgagtaaagcccccagcagcagtgctgaggccaagagcaagcgcagcctggaagccatagaggagaaggaaagtagtgaggagaatgggaagctgtgactctgggcattatcgacacgttcacccatcttatcaaggactctggtttctcattcttgttttctttctttaaatgttttataagttcacaaaatggtgccctatatggggtattggacatagatattttcacaatgtcagtatttcagtgtagttaatttatctaaattaaagcctttagtatcagtgttttaaattctgagacatgtgtcaacacccctgtgtggatgcctgtggaagagtgtgtgtgtgtgtgtgtgtgtgtgtgtgtgtgtgtgtggcagagagagagaaagagagagagagaaattctgttaaaatctattctgtgttgcattattcatttagtgagttattccttgatcattttgggacaattgttttaatctgaaattctaaagagcacttactgtaacctgttgctgtgtttaatttgacttctctgcctttgacatttaatttagtgatcttagcatagcttattattgaaggaagccaaatttatcaaagcatacatgttttggtagattaaatatagattagaaaaattcctaagaatcagagtagaaataaaagtgaatgaaagattaaacagatgatgagaatttctaaaaagattagcaaggtcatttcttcagtcagaaaactttaaaaaatatttattaaataaaatcaatttttaggaagttttctgtagtcatttactaaacatatgatttcactagaaaagctgatcataagtgaatttatacctacctgtgtggctactctgaaacacactgaaagctctgttgcaattaggatttgatgtgacataatattgttgtataatttcgagatttgtaggaaggtctcattcttccaagctgagagtctagcactcattttctataacagatatggcagcttagaggtgttggctttgtttggatgtaattttaggggtactaaaatttaaaatttaaagataattgttcaacaatatcatatcatcacattgagctgatataaattctgtgggtccgataatatctttgtgataatttaagagctaaccagttaccacacatctatgatataaccctaacacacacagaaagcatacatgcaaaaagaaatgactaattagggtacatttataattgcatctaggtaatttttaccctaatgtcttcataaagtacttgagtgtaatgtttgttacctccaacagaactaaatgttctatggttatgaaagaatatatttatttaaagcattgcttttattttgaaaagcttcttaattaatttgattaacaaatatgctaatttggggaaacctagagaagataattgttgaaattttgcaaatataaacatctcctat

SEQ ID NO: 6583 - DNA, 1137 bp, Homo sapiens; identical to SEQ ID NO: 664
  misc_feature (1)..(1137): n=a,t,g or c

SEQ ID NO: 6584 - DNA, 1238 bp, Homo sapiens
  misc_feature (1)..(1238): n=a,t,g or c
agactgaggttagaaggcacaggtggcgagatgagccgggtaccagcgttcctgagcgcggccgaggtggaggaacacctccgcagctccagcctcctcatcccgcctctagagacggccctggccaacttctccagcggtcccgaaggaggggtcatgcagcccgtgcgcaccgtggtgccggtgaccaagcacaggggctacctgggggtcatgcccgcctacagtgctgcagaggatgcactgaccaccaagttggtcaccttctacgaggaccgcggcatcacctcggtcgtcccttcccaccaggctactgtgctactctttgagcccagcaatggcaccctgctggcggtcatggatggaaatgtcataactgcaaagagaacagctgcagtttctgccattgccaccaagtttctgaaacctcccagcagtgaagtgctgtgcatccttggggctggggtccaggcctacagccattatgagatcttcacagagcagttctcctttaaggaggtgaggatatggaaccgcaccaaagaaaatgcagagaagtttgcagacacagtgcaaggagaggtacgggtctgttcttcggtccaggaggctgtggcaggtgcagatgtgatcatcacagtcaccctggcaacagagcccattttgtttggtgaatgggtgaagccaggggctcacatcaatgctgttggagccagcagacctgactggagagaactggatgatgagctcatgaaagaagctgtgctgtacgtggattcccaggaggctgccctgaaggagtctggagatgtcctgctgtcaggggccgagatctttgctgagctgggagaagtgattaagggagtgaaaccagcccactgtgagaagaccacggtgttcaagtctttgggaatggcagtggaagacacagttgcagccaaactcatctatgattcctggtcatctggtaaataaaacaaaggaacttgatgttgagatggatgcttgaggaatattgctgctggttctcataatttctagagtaaatgagggagtccagtccccagtgaactctccttttgtgcttatcatgttttaccttaaatgctgagatcctcatttatgtttgtagttggaaagcaaagctaggtagccatttcttctgttctaccaagttataatagcattcatttccctttatatttccctgaaataaagcacattccaattgtgcagtg

SEQ ID NO: 6585 - DNA, 1834 bp, Homo sapiens; identical to SEQ ID NO: 6286
  misc_feature (1)..(1834): n=a,t,g or c

SEQ ID NO: 6586 - DNA, 2518 bp, Homo sapiens; identical to SEQ ID NO: 699
  misc_feature (1)..(2518): n=a,t,g or c

SEQ ID NO: 6587 - DNA, 2482 bp, Homo sapiens
  misc_feature (1)..(2482): n=a,t,g or c
ttctgtttagatctcactgatgaaaaggcctccaggtttttcacctttccgatcatcacgaataggggaaataaaagaagaaacaactgtaagtccaccccacacttccatggcacctgcacaagatgaagagcgggattcaggaaaagaacaagggcatactcgtagacatgactggggccatgaaaaacaaagaaaacataatcttggccatggccataaacatgaacgtgaccaagggcatgggcaccaaagaggacatggccttggccatggacacgaacaacagcatggtcttggtcatggacataagttcaaacttgatgatgatcttgaacaccaagggggccatgtccttgaccatggacataagcataagcatggtcatggccacggaaaacataaaaataaaggcaaaaagaatggaaagcacaatggttggaaaacagagcatttggcaagctcttctgaagacagtactacaccttctgcacagacacaagagaagacagaagggccaacacccatcccttccctagccaagccaggtgtaacagttaccttttctgactttcaggactctgatctcattgcaactatgatgcctcctatatcaccagctcccatacagagtgatgacgattggatccctgatatccagatagacccaaatggcctttcatttaacccaatatcagattttccagacacgacctccccaaaatgtcctggacgcccctggaagtcagttagtgaaattaatccaaccacacaaatgaaagaatcttattatttcgatctcactgatggcctttcttaatttaagtggctatgggtatttctttcatactttattaaagtatcaatatccctctctccattgtccagatgaaaatatcctgatataatgcaccaaaaaccatgcagcttcggaacagtctaaagagaagtggtgagactcccagtggagacaccatcagtctccacggactgcataaaattgtgtgccacaattctaactcttttctgaatcttcttcccaagttttctaaactagcacagtaaacagacaaactaatgtgccgtatggcctgctgcaattggcttctctgataacaaatatgtaccttacaacatatgtcatgaatttgcatacaaagattcttgtcattcttaataaactgtggcacttggtatttgaatgtgtgtgaaaataagggaagtcaagagattaaatgctgaacttattaatggaatagaaataataaggaggctgaggctggagaattgcttgaacccgggaggcggaggttgcagtgagccgagatcgtgccactgcgctccagcctgggcatcagagcaagattctgtctcagaaaaaaagaaaaaaaaagaaataataagaaaaacttccagatttcaaagtaacaagaaagaagacaggttggccaaagggaggaaaggggggacataaattaattgactttctattcccaaaatgggctagttatatcaaataaatactcccactgccctttctgagtgagagtgtttctcataagtcaaaaatttctgtctactcattaactactctttgcaacaggctttcatatagaagtattctgtttatttttgctgagcctagattgagtaattcttagtttacagaagctccgagcttaatgataaggatgaaaagcagagggagcaatatagaagcaggcttgctaataaaactttttaaataattgacaagggaatattatggaatgtgatgcaaagtttgttccgaaattttatgaggaaattactctctagtctcactttatagtctttttgctatgactttgaagaccattgatttttgagaagcagaataataggattgcctttcattgccctatagtgcaaagaaggtatatgctttataaccaatgttgtacttttgcctagaaaaacaagatatggctttaaatagctacaatcatctttggatgtatatgtcactgctgcttcaagttattggatgcatttgaacctctgagtttctctttcattttaaatattgtctgttcttttaaataaacaaccacagatgtcaggaaaaagtcttaccttgtcaactggttgctccactttttaaaaatgatgaatgataacatcatattaactgcgttttactatacttacagagtcacctaaggtcctgcgagtacaagggtcgacccccaaaggcaggggcagagccagcatctgagagggaggtctcttgaccaatgggcagaatcttcactccaggcacatagccccaaccacctctgccagcaaccttgagaggaaggacaagaagaaagatgggatagaatttaaatagagaagaatgccattttatcactctgcctctgggtgaaataaagatcagtcttgatgttctaactctaattcacagtggtctcctttcagccctacccattctgcagca

SEQ ID NO: 6588 - DNA, 1549 bp, Homo sapiens
  misc_feature (1)..(1549): n=a,t,g or c
agaactcggagccagcccggcccgggggaccctgctggccaaggaggtcgtcagtccggtcttgtcttccagacccggagaccgaagcttccggacgacgaggaaccgcccaacatggcctcggagagtgggaagctttggggtggccggtttgtgggtgcagtggaccccatcatggagaagttcaacgcgtccattgcctacgaccggcacctttgggaggtggatgttcaaggcagcaaagcctacagcaggggcctggagaaggcagggctcctcaccaaggccgagatggaccagatactccatggcctagacaaggtggctgaggagtgggcccagggcaccttcaaactgaactccaatgatgaggacatccacacagccaatgagcgccgcctgaaggagctcattggtgcaacggcagggaagctgcacacgggacggagccggaatgaccaggtggtcacagacctcaggctgtggatgcggcagacctgctccacgctctcgggcctcctctgggagctcattaggaccatggtggatcgggcagaggcggaacgtgatgttctcttcccggggtacacccatttgcagagggcccagcccatccgctggagccactggattctgagccacgccgtggcactgacccgagactctgagcggctgctggaggtgcggaagcggatcaatgtcctgcccctggggagtggggccattgcaggcaatcccctgggtgtggaccgagagctgctccgagcagaactcaactttggggccatcactctcaacagcatggatgccactagtgagcgggactttgtggccgagttcctgttctggcgttcgctgtgcatgacccatctcagcaggatggccgaggacctcatcctctactgcaccaaggaattcagcttcgtgcagctctcagatgcctacagcacgggaagcagcctgatgccccagaagaaaaaccccgacagtttggagctgatccggagcaaggctgggcgtgtgtttgggcggtgtgccgggctcctgatgaccctcaagggacttcccagcacctacaacaaagacttacaggaggacaaggaagctgtgtttgaagtgtcagacactatgagtgccgtgctccaggtggccactggcgtcatctctacgctgcagattcaccaagagaacatgggacaggctctcagccccgacatgctggccactgaccttgcctattacctggtccgcaaagggatgccattccgccagcccacgaggctccgggaaagctgtgttcatggccgagaccaagggggtcgccctcaaccagctgtcactgcaggagctgcagaccatcagccccctgttctcgggcgacgtgatctgcgtgtgggactacgggcacagtgtggagcagtatggtgccctgggcggcactgcgcgctccagcgtcgactggcagatcgccaggtgcgggcgctactgcaggcacagcaggcctaggtcctcccacacctgccccctaataaagtgggcgcgagaggag

SEQ ID NO: 6589 - DNA, 4656 bp, Homo sapiens
  misc_feature (1)..(4656): n=a,t,g or c
ggccagtttagttgtgctcagtggctatggattgcaacacattggtctaatgaggcctggagattggttcagaagcttttgccaagcaacaaataagaattccttcatcctgcctccctgcagtgtaaatgtgccaaggtcaagtggctctatgactagctttgagtttcacctggtgggacctcttgtccttcaggtcctcgctgctgtctacaaggccctgaatgaccatcatgtttacctggagggcaccctgctaaagcccaacatggtgactgctggacatgcctgcaccaagaagtatactccagaacaagtagctatggccaccgtaacagctctccaccgtactgttcctgcagctgttcctggtaaggccttctttcttctctaactcaaggtcttagccctcattctttggagagccacaagctttctgtttgtccagaaatctgcttctattcatgaaacaaacctctgttatctcacaggcagccagcacttcttctcccacttcagaataccaagcatcccaagtctgcccaaatgcccacaatccatgtatttcttcaacatttcactgccttccttacgtatttaaagcacttatctctagcccaactagcttcagcaaaagcaaactgatttctcagtttgctttaaggcaaattaagcagagaaaagactgagacattacttttctggtaggttcattgcttgctttctcaagcagggtatataaggtgggactaatagagtgaaatggccttctctcctaccaggcatctgctttttgtctggtggcatgagtgaagaggatgccactctcaacctcaatgctatcaacctttgccctctaccaaagccctggaaactaagtttctcttatggacgggccctgcaggccagtgcactggctgcctggggtggcaaggctgcaaacaaggaggcaacccaggaggcttttatgaagcgggccatggtaagatgctgccacctcttatctacttgatgatgttcacatttggggcttgactttccaacacggagaagcattgttttcttcgggccaagaaggtatctaccaatagtgtctattaggcatttgaaaatgtggcagtagaggtcagtatgaggattgaggctagagagaattttgaattatccacactagagtatagttgatgacaggagactgaaggacaatttcaacagaaacacttcagagggaaggagataagaggaccaagaactgaacctaggatactttttattttgggaagatgaagaagagaagcaaccaagaaaagcagcgattatattgtagggtgaaccaagcattctgggaataaagacagaagaatttctttctttcatgtttatttgtttgtttgtttgtttgttttgagatggagtgttactctgtcacccaggctggagtacagtggcacaatctcggctcactgcaacctccacctcctggattcaagcaattcttctgcctcagcctcccaagtagctgggactagaggcatgcgccaccatacctggctaatttctgtatattttagtaaagatggggtttcaccatgttggccaggctggtctcaaactcctgacctcaggtgatctgcccacctcaacctcccaaagtgctgagattacagacatgagccaccacaccagccgggtaaacaatttcaaagggccaataataacatgctatagagagattcaaaagaaaggccaagaaaagaccctgagattggcatttaggagcataccagtgaccctcactgaaacagtttcaataaagaggaaaggaaaggtgcccactcaagaagtttttcagaaaaagacccagaaaggttgccaggagaaatgaggaccaacaaagtttttattcaaataataaccaaaatttttaaaatacgctttatgagccaagaactggggtgaacaaatgagacatagccatgtcctccaggaagcttggagtttagccaaataggagagagcttggcatgtttaaatgtaaagaaagaggagccagaggagacagtaaagatgaggagagtggggataattgagtggagaagaacttagaggagcaggactgcatgagactcaatattaagcataggtggcacagctggtgtaagacaaaaaggagggaagaggcagaaaagagaatacagttggaatcagctctatataagtcaagagatgtagcagttgatgactgattacagttgagggtatctgctgagaatgatgaagaaatggaaatttcaatactgacagtcggaaagcgtagaaaagcagttaaaggaacttgctaggaaattgatcggacgttatggccagacatagccaagcatcaggtaatgtgcagctgaaataagagtgagtgtgtggtagcttcattcctgagttttcctaacagcagtctaaagcatgcaggaagattcagaacgcaaaatagcggggtagaagagtgaaagtttaataggaagatagaagagtgacaaattttaccgatagcctctgttagcttgctgaccatagaggaagctaggcaaggaatcaagagtagtcagaagtgtggtgatgaggccctaaagggaaggaaggccccagggaagctaaatcatcatctcacaggcataagagaggtatcagattttcaaagtagtgctttaccttgactgtggaaagcagggtgcagcagtgctgctgtgtggctgatggactgaggagacctagcttacatgatggagggattgtgaaagcgcaggtcatcagggacatccacacagaagaagggaagctgagtttatcatcaagaatggtgcttcccaagctccagtgtggatctgaatcacctgaaggtgattttggttttgttgttatgatcttttatatttacacacaataattgtatagatctgtggggtatctgtgattttttatatatgcatataatgtataatgatcaaatcaggataattagggtattcactccaaatatttattatttctttgggtttggaacattccaaatcttctcttccagctattttaaaatatgtaataaatcattgttaactatagtcatcttactgttgtatcaaacactagaacttattccttctgcctaactgtatttttgtacccattaccaacctcttttcatttcccctacccccacttgaagcgcttgttaaaaatgcagattatgggtctcacccactgagtttctaattcagtaggtcaggggtaaggccagggaatttctatttttaacatgttcctaagggatgctggtagaccatgaaacacagttggagaaccattgatgtaaaatgtagaaataagtcctggagagaacagacaatagcaacactgactggaagaagtggtaccactgagtgacattcaaatattgtcgtaagtttcataattctgaatttatctttaactggaatgtatacaggaaagcaaatgatactacaataactaaataaaaattacatattcttctagaccaatataggtagaaaatggaaatgtttttaaaataaacatgtttttcttttggtatagtgtactatactagtgagaaatttttcaactttagtttctagtactgttgctgcaatattgttggtactgaacagagatttccccagtaactgacacaaacctcaagcttaccaaagaaatgctcagaaaactgggataaaaaggggagatactttatagaaggggatggtatccccagcaatattcagcaacattgctgtaaaaagaagaaaatctgagtgaaggtttgactggtttcccatgagaggcagacagggtcaaggtggggtcacatttactctaaccagtctcctctctcatatttgtcttctaggctaactgccaggcggccaaaggacagtatgttcacacgggttcttctggggctgcttccacccagtcgctcttcacagcctgctatacctactagggtccaatgcccgccagcctagctccagtgcttctagtaggagggctgaaagggagcaacttttcctctaatcctggaaattcgacacaattagatttgaactgctggaaatacaacacatgttaaatcttaagtacaagggggaaaaaataaatcagttattgaaacataaaaatgaataccaaggacctgatcaaatttcacacagcagtttccttgcaacactttcagctccccatgctccagaatacccacccaagaaaataataggctttaaaacaatatcggctcctcatccaaagaacaactgctgattgaaacacctcattagctgagtgtagagaagtgcatcttatgaaacagtcttagcagtggtaggttgggaaggagatagctgcaaccaaaaaagaaataaatattctataaaccttcagctgctatcgggtttcacttttctgctcttgctgtccaaagactcagtgtatttcattacttttgactctactagacatgactgggtttcaacagtaaaggtcttcaactcttgctagtcattggaatcaagccgcaaaattttaaaaactgagatgctcaggccacaccccagctcaattaaatcagaaaccctagacttgggatcc

SEQ ID NO: 6590 - DNA, 2353 bp, Homo sapiens
  misc_feature (1)..(2353): n=a,t,g or c
actaactctacctttctggcttcagggggaggagagttagatcatgcatttgtccgatccatctctgttcacaggacaccagacatcagagacagagagaaaaattcaaagggccaacccgtctttcctttgggcagtagacctgaagtagcgggaagagcagaaaggatggggcagccatctctgacttggatgctgatggtggtggtggcctcttggttcatcacaactgcagccactgacacctcagaagcaagatggtgctctgaatgtcacagcaatgccacctgcacggaggatgaggccgttacgacgtgcacctgtcaggagggcttcaccggcgatggcctgacctgcgtggacctggatgagtgcgccattcctggagctcacaactgctccgccaacagcagctgcgtaaacacgccaggctccttctcctgcgtctgccccgaaggcttccgcctgtcgcccggtctcggctgcacagacgtggatgagtgcgctgagcctgggcttagccactgccacgccctggccacatgtgtcaatgtggtgggcagctacttgtgcgtatgccccgcgggctaccggggggatggatggcactgtgagtgctccccgggctcctgcgggccggggttggactgcgtgcccgagggcgacgcgctcgtgtgcgcggatccgtgtcaggcgcaccgcaccctggacgagtactggcgcagcaccgagtacggggagggctacgcctgcgacacggacctgcgcggctggtaccgcttcgtgggccagggcggtgcgcgcatggccgagacctgcgtgccagtcctgcgctgcaacacggccgcccccatgtggctcaatggcacgcatccgtccagcgacgagggcatcgtgagccgcaaggcctgcgcgcactggagcggccactgctgcctgtgggatgcgtccgtccaggtgaaggcctgtgccggcggctactacgtctacaacctgacagcgccccccgagtgtcacctggcgtactgcacagaccccagctccgtggaggggacgtgtgaggagtgcagtatagacgaggactgcaaatcgaataatggcagatggcactgccagtgcaaacaggacttcaacatcactgatatctccctcctggagcacaggctggaatgtggggccaatgacatgaaggtgtcgctgggcaagtgccagctgaagagtctgggcttcgacaaggtcttcatgtacctgagtgacagccggtgctcgggcttcaatgacagagacaaccgggactgggtgtctgtagtgaccccagcccgggatggcccctgtgggacagtgttgacgaggaatgaaacccatgccacttacagcaacaccctctacctggcagatgagatcatcatccgtgacctcaacatcaaaatcaactttgcatgctcctaccccctggacatgaaagtcagcctgaagaccgccctacagccaatggtcagtgctctaaacatcagagtgggcgggaccggcatgttcaccgtgcggatggcgctcttccagaccccttcctacacgcagccctaccaaggctcctccgtgacactgtccactgaggcttttctctacgtgggcaccatgttggatgggggcgacctgtcccgatttgcactgctcatgaccaactgctatgccacacccagtagcaatgccacggaccccctgaagtacttcatcatccaggacagatgcccacacactagagactcaactatccaagtggtggagaatggggagtcctcccagggccgattttccgtccagatgttccggtttgctggaaactatgacctagtctacctgcactgtgaagtctatctctgtgacaccatgaatgaaaagtgcaagcctacctgctctgggaccagattccgaagtgggagtgtcatagatcaatcccgtgtcctgaacttgggtcccatcacacggaaaggtgtccaggccacagtctcaagggcttttagcagcttggggctcctgaaagtctggctgcctctgcttctctcggccaccttgaccctgacttttcagtgactgacagcggaaagccctgtgctccatggctgccatctcacctcctgctgggcagggggcatgatgcgggccagtgctccagccacagaaaagaaagttcatgctttgttcagcctgccttcttttctcccttttaatcctggctgtcgagaaacagcctgtgtctttaaatgctgctttttctcaaaatgggacttgtgacggtgtacctgaggcccccatctccttaaagagtgtggcaaaataatgatttttaaatctc

SEQ ID NO: 6591 - DNA, 1104 bp, Homo sapiens; identical to SEQ ID NO: 715
  misc_feature (1)..(1104): n=a,t,g or c

SEQ ID NO: 6592 - DNA, 3762 bp, Homo sapiens
  misc_feature (1)..(3762): n=a,t,g or c
cccgcgagcgtccatccatctgtccggccgactgtccagcgaaaggggctccaggccgggcgcacgtcgacccgggggaccgaggccaggagaggggccaagagcgcggctgacccttgcgggccggggcaggggacggtggccgcggccatgcagtcctgtgccagggcgtgggggctgcgcctgggccgcggggtcgggggcggccgccgcctggctgggggatcggggccgtgctgggcgccgcggagccgggacagcagcagtggcggcggggacagcgccgcggctggggcctcgcgcctcctggagcgccttctgcccagacacgacgacttcgctcggaggcacatcggccctggggacaaagaccagagagagatgctgcagaccttggggctggcgagcattgatgaattgatcgagaagacggtccctgccaacatccgtttgaaaagacccttgaaaatggaagaccctgtttgtgaaaatgaaatccttgcaactctgcatgccatttcaagcaaaaaccagatctggagatcgtatattggcatgggctattataactgctcagtgccacagacgattttgcggaacttactggagaactcaggatggatcacccagtatactccataccagcctgaggtgtctcaggggaggctggagagtttactcaactaccagaccatggtgtgtgacatcacaggcctggacatggccaatgcatccctgctggatgaggggactgcagccgcagaggcactgcagctgtgctacagacacaacaagaggaggaaatttctcgttgatccccgttgccacccacagacaatagctgttgtccagactcgagccaaatatactggagtcctcactgagctgaagttaccctgtgaaatggacttcagtggaaaagatgtcagtggagtgttgttccagtacccagacacggaggggaaggtggaagactttacggaactcgtggagagagctcatcagagtgggagcctggcctgctgtgctactgaccttttagctttgtgcatcttgaggccacctggagaatttggggtagacatcgccctgggcagctcccagagatttggagtgccactgggctatgggggaccccatgcagcattttttgctgtccgagaaagcttggtgagaatgatgcctggaagaatggtgggggtaacaagagatgccactgggaaagaagtgtatcgtcttgctcttcaaaccagggagcaacacattcggagagacaaggctaccagcaacatctgtacagctcaggccctcttggcgaatatggctgccatgtttcgaatctaccatggttcccatgggctggagcatattgctaggagggtacataatgccactttgattttgtcagaaggtctcaagcgagcagggcatcaactccagcatgacctgttctttgataccttgaagattcattgtggctgctcagtgaaggaggtcttgggcagggcggctcagcggcagatcaattttcggctttttgaggatggcacacttggtatttctcttgatgaaacagtcaatgaaaaagatctggacgatttgttgtggatctttggttgtgagtcatctgcagaactggttgctgaaagcatgggagaggagtgcagaggtattccagggtctgtgttcaagaggaccagcccgttcctcacccatcaagtgttcaacagctaccactctgaaacaaacattgtccggtacatgaagaaactggaaaataaagacatttcccttgttcacagcatgattccactgggatcctgcaccatgaaactgaacagttcgtctgaactcgcacctatcacatggaaagaatttgcaaacatccacccctttgtgcctctggatcaagctcaaggatatcagcagcttttccgagagcttgagaaggatttgtgtgaactcacaggttatgaccaggtctgtttccagccaaacagcggagcccagggagaatatgctggactggccactatccgagcctacttaaaccagaaaggagaggggcacagaacggtttgcctcattccgaaatcagcacatgggaccaacccagcaagtgcccacatggcaggcatgaagattcagcctgtggaggtggataaatatgggaatatcgatgcagttcacctcaaggccatggtggataagcacaaggagaacctagcagctatcatgattacatacccatccaccaatggggtgtttgaagagaacatcagtgacgtgtgtgacctcatccatcaacatggaggacaggtctacctagacggggcaaatatgaatgctcaggtgggaatctgtcgccctggagacttcgggtctgatgtctcgcacctaaatcttcacaagaccttctgcattccccacggaggaggtggtcctggcatggggcccatcggagtgaagaaacatctcgccccgtttttgcccaatcatcccgtcatttcactaaagcggaatgaggatgcctgtcctgtgggaaccgtcagtgcggccccatggggctccagttccatcttgcccatttcctgggcttatatcaagatgatgggaggcaagggtcttaaacaagccacggaaactgcgatattaaatgccaactacatggccaagcgattagaaacacactacagaattcttttcaggggtgcaagaggttatgtgggtcatgaatttattttggacacgagacccttcaaaaagtctgcaaatattgaggctgtggatgtggccaagagactccaggattatggatttcacgcccctaccatgtcctggcctgtggcagggaccctcatggtggagcccactgagtcggaggacaaggcagagctggacagattctgtgatgccatgatcagcattcggcaggaaattgctgacattgaggagggccgcatcgaccccagggtcaatccgctgaagatgtctccacactccctgacctgcgttacatcttcccactgggaccggccttattccagagaggtggcagcattcccactccccttcatgaaaccagagaacaaattctggccaacgattgcccggattgatgacatatatggagatcagcacctggtttgtacctgcccacccatggaagtttatgagtctccattttctgaacaaaagagggcgtcttcttagtcctctctccctaagtttaaaggactgatttgatgcctctccccagagcatttgataagcaagaaagatttcatctcccaccccagcctcaagtaggagttttatatactgtgtatatctctgtaatctctgtcaaggtaaatgtaaatacagtagctggagggagtcgaagctgatggttggaagacggatttgctttggtattctgcttccacatgtgccagttgcctggattgggagccattttgtgttttgcgtagaaagttttaggaactttaacttttaatgtggcaagtttgcagatgtcatagaggctatcctggagacttaatagacatttttttgttccaaaagagtccatgtggactgtgccatctgtgggaaatcccagggcaaatgtttacattttgtataccctgaagaactctttttcctctaatatgcctaatctgtaatcacatttctgagtgttttcctctttttctgtgtgaggttttttttttttttaatctgcatttattagtattctaataaaagcattttgatcgg

SEQ ID NO: 6593 - DNA, 15571 bp, Homo sapiens
  misc_feature (1)..(15571): n=a,t,g or c
aagcttcctcactccttggcacctggctccgacatcacattgacttttcccttcctgcttctaccatcacatcaccttcttctgactccaatctcctgcctctttcttgcaaggatccttgtgattgtaattaggacccagctggataatccatgacaatctcttcaagatccttaacttaatcacatctgcaaagtcccttttgtcatagaacgataacattcacaggttctgggtattaggacacggataacttcggggttccattactcacccataactggtatgcagtgctgatttccatcctgtaggtacggtttagggatctctaggtcaatgagataatggactcttgctcatgttacatggcataatgggaagaaagccaaacctagaaaaagagggactcaggttcccttgttagagcctcttcttactaactgtgggattaggggctgattccctgacctgctgtgttctgtcttctctccaattcaatgggaatgaactgtgagggcactgagcaaaaactaaggtctcaatacctagtagtagtgggacttgcctctggatacccagtagtgatcctgccgcctgtttctggatatcctacagtagcaatcccacctgtttctggatatcctacagtagtgatcctgcctgtttctggatatcctacagtagcaatcccgcctgtttctggatatcctacagtagtgatcctgcctgcttctggatacccagaagtgatcatgcctggttctagatacccagtagtgattgtgtttcctctagatacccagtaggtattgtgcttgcttctagagatgtagtagtagctggacttagctctagatacccagtgctcatctctagactgggctgagatcagtgtctcccttgaagggttattgtaaggatgaaaaaagataatgcgtttaaagcacttggtgtagtaggtggtctttttaaaagtgtgaataaatactagttcttattatttctgtggatatccaacagccacataattgggccccaaagccatgaagaaggaagaggaaatgtcttaaaggttgtcgatggacagtgtttgctgaacatcaaaatcactttccaggtattacctctgatttgctctaccaactccacaccccacctgcagccacataaccttccatgatcacggccatgcacaacacaccatgtcccccaggcaaggggaccttagaaacataaccaggcttgagacagcactctgcaccggtgtcttggaaatgctcttaagagtgtatggctgagttagggaaccaggatttcaaagtagaaagggagaatctacccaagcccatagaaatcctgaatccactcctttctcagcaacaagcactggcctgggagtcagccacttatgcaccaaccccactctgcccctaattaaatgcatgactttgaaaattcccctcattcttctgagccccaattcagtgattggtgcaatcacaggcttggctacagtgacccattcattgcaggcatggtgagactctcaatccctctcatttccactagaatctaactgttgggatctatgacccagtcagcatagcaggcctgtggggagctctcaggttcaagcatatgccccccctaatctacaagaaattagctgcagaaaaccaaggaatagaacctggaaaaagagagggtttgctagagctgtccctttccctgtctctggaatgccaacaatagggaggctctttggtcttgtctctcaggagtgcccatgccattccaggaaaatgatggcccagctggtggtgtaaggcttggggggcagcgagtgggcatcgtggtgaaagcctcgggatcagggagctgcgtctgcaggcaggcctgctggccggaaacctgccaggaaaggaaggggctgtctcggggcggggccagggaggggtggagacagggccggctgtggtcagtgacaaatgctggctgcaatccagccagccctctgccctttctgagcccgagggactgccacctccactgtgtgcacactcagctacgggacacagtaagtaccgatgccgcaaagggaggtccccagggcttgagggcatgtgaggcgaggagaggatggactctagagttttggggtttggggtctgcaaagctctgaaggagtctcatctctgcagtttcaggtatccaaggcagcagaggtgagtgggtcccccgagctctgtgaccttatgctccacactaactctggcagagcctccgtttcctcataggtaagatggaaataattacaccctctggatggtgtgactgaagattaaatacagcgggtgctctcactcagcacatctggccatgtctgcagacacatttggttgccacaactggaaggggggtgggggttagtgacatctagaggccagcgatgctgctgatgatcccacaatgcccaggacaagatcacaaagcatcatcctgttcaaaaggtcaacaggatcaaggttgagagaccctgaaataaggccatggggacaaaatgtcggctggataggaggtgctcagtaagtggcagcttctgttgttttctgtgcctggagtcttggggctttagaaatcaggaacaatgatccaatattatcggcttccgtgagataagggcatcttgcctggaggctgccacccaggccggtcatggcagctgctcatgaaggacagtaacaatttggcagtttgttaaatgaacaaaatgtagaaataaagtaagcagaatttttagtttttctgaaggtagggcttttggccagatatgcagcaataaaagagcaaactgcttccttgggccagtgtccttgctcatagatcaggaaaccgaagcatgaagaatacaggcggcagatgcctgaaggtaacggacgtgttcatggtgctgacggtgatgataagtgacagatgtagactcatctccaaacttgtcaggttatagacattaaatatgtgcaactttatgaatagcagtcatgtctcaatcaagtggttttaataaagaaataataggaagccagagctgagagacagggagggagttgttcaaggtcacctggcaagtgagctccggggcggggagagctcagctctgggtggccagcctggctttttccactgctcagtgtccagcttgcagtctaatgtctcgaattacagagaaggagactggtcagttcattcattcattcattctacaaaggtttatggagcatctctcctgactgcaagctcttgaaggtgagagcagcacaaatgagggtcccatggagagagaggccggaatgaaaaatgtcaatgacaaatgcatatataaaggcacatgtgtaattgaaagagctttgagagaaagagtcaagggactgttccagagaatagccatggaaggggaaaaggtccagtgtgataaggtattgcaaagaagtgacatttaagcaaaagcctgcagcctatgcagaagttggcctcagtgagaaaggttgggggagggttccagtagagagggaaggtatgcaaaggcccagagttaggacagaacttgctgtgtttgagaaactgggaaaagaagagtgagcctgggggtatcacgtgatccagggcagagcaggtccaggccaggtgcagccaggtcacagcagccctagtgggttagagcacaaatcaaagtttagcatttatctgaaacacaggagttggccatgagtttcttaggcgaggaagcgctgtgaccatatttatgattgaaggagattcttttatatgctgtatatagaaagcctttcagggcaaagaaaggaagctactggggtagccctgggggagatgaagggagcttccactgggggcagtaagaaagccagggaaaggcggcagctttaagacctgttttggagatagaacggacaagctttgctgatgggctggagtggaacaggaagtcaagattacttcttctgggaagttctgttcctgggtctttaggatctagaggaagctgtgactttgtctctcatctctgcctgggctccaagcctcacatccctttttgtaattagaagatattggacagaccgtcctcactaacacaattcccacagctgagtccagggtagaactgggcaggacttcactgcccaacacgggaaatatcagtcagcagatttgggtttcggggatggtggtgggccagcgggaagactgaccagggcctacccatcacatccccaccacctcccacctcaattcaccttggcctgagatgacaggtgaacatgactgatcctctctcttccctctgcagaaacactaaagccagggaccaggagaggggcagcccaaccaagctttcaaagcactcagtagaggctggtctgggggatgggaggctcccagggcttcacctgtctctgtcaaagccatgtatttccaccagaggcccaagagtgcgatggcaaaccctggatttgaaactaagaaacgtaaaacaagcactgaggactccactgcctcttgagtgacctctctgaccctctgtttcttctgcactgttaggataatgatactaactccatgttgttgtagagaagtataaatgagctaatacaggtgaaccgcctggggataccaggaggtgaggtcgaggaggaacgaggtatcactcctcagagccactcagagagaggctgtgcacgagtcagaggaacctggattttaattccggttccatcactcagtagctgaaacaagctattccacttcacttagcctcagtctattcaatctgtaaaatagagtgagtttacttttggaaaactctgtaaaatagagagcttacttttggtgaaggttaaacatagtaatatttatggagtgtctagtatgtctttaataattagtggttttactgaaaagtagagagagttggcccagagggagcaagatttctgggtctcaaacatgtagcccaggagagcctaagtgaacctggggccctctccaaacagatcctgggggagactcagtgcacacccggagaagcagctcctccccatcggatctctagtgcttggcagggggcggggtcttgagggggtgtccacaacacatggcagactgcagatgaagaaactgaggcccagagggggtgaggcttgcccagggtgacctagtagctgaatagatgggagaatggagccagggcctcactgagactctctggtcagctgcccctgggctgtatccaataaggaaactcccctgcttctgaagctgttctcgaaattatcagctcagtgtgaccctgtggggggttgagccacattgtttctttagaagcatctccatacatggctggttccaacccttggcaggagggaccatattgtgctgtaaaatagactcatttagagaagccggagattaaagcacccacctatgtccttcaaagctctccaggcaagtgccatggtgggaacaggtagggagtgtcagtggggggaagcccagactctgctcactcattatctgcagattagggctattgttggtggctactaagtcagggatttcaaaatcaggaagatgcagccaggaaaagaggaggcaggactctgcagaggaggcaggactctgcagagtcagagtgataaccgagtctgagtccaagctttgccagtgttagcaagcgactccatctctctgaacctcggattacccatctgtaaaatagagctagcagcaagatgtacctttttgggtggtgcagggctgaaggagttggcacagtgcctgaaagagggtgcgggcaatgcgcccaactgctgtggctgctgggtttggtgccaggttcgattctgcaggcagaaacttctacatgaggctccttctcggaaggagctcaggacacaatttggaggctgggctggcaagggtgacctgctggagctattcaacttcacttaaagacaggcctgcagtccaagcctgcccaattcctgagaccattctctctccactgctgagccccacggccactctgcaagggatttcccacccacctgtttggggccctttggagtttggttttaattgggtcacgggatgctgtgacaggctgcccctgcctggtggggatctggggtcactgatgacattgtgcccatggagagagcccagcagaaagggattccctccaaggcgacacacagggcaaagctcacatcagaagccaggcaggccctctgcacctggtaattagccggcccgggtgctgtcaggctcacacgtgtgtgtgtgtgtgtgtgtgtgtgtgtgtgtgtgtgtgtgtaaagcatgtaccctatggtacagttgagaatatggaggcctcagatggggcttttgcagaaactgccatgcctactgctcacacttccatagcacgtgcccccaagcaccccatggtgtaggtgctgttattatcactatcttacagttatggagcagtggctcaaggtgtaactgatttgcccaaaatcacactacaaggacacagcagggctgagatttgaacccaggcagtggcttcagagcctgagctgtttcctactgcagagggaggaggcaagacttctacccgtagccagatggggaggcatgggcacaggaacggctcttgggtgaagtggagggaggaagaggaggactgaaggcgaaggccacgtcaggagtgatgggataccccacaaaggcctccctgagaagcgctagagacaaagatgagtgcctcctcatctggaagatgaaaagatgtctttgcctgcatgggctgccgtcacaaagtcccaggggctagggggcttcaacaacagaaatttctttctttacaactctggaagctggaagtctgagattaaggcaccagcaggatttgttccttccaaggcccctctccttggctcacaggtggctgccttctccctgtcttcacctggtcttccctctgtgcatgtctctatcctgatctcctctttttaatttttgtgtaaggacgtagtcatattgggttggggcccactctagtgacctcattctaactcagtcccctctttaaaagccctatctccagatatagtcacattctggggtattgaaggtaaggacttcagtatatgcattttgggggcacaattcagccagaacaggaggacggtggggatgtccacatgaagaggttcaggcagaattcctttaggaggggaagatgtctctctgtgggacaagggtggcatggagcagcccctgggggaaggagaaggggacagtttgcatactggtattctgcctaccccagggtggacactcactcagcgtttgctgaatgaacagggcaaggccagcagtgctgatggtcccaggcatgtagctggtctgagttcatagaaggaccacagcgccctgccatgtgccaaaccaggacaccagagtgaaggccagaagctcacatggaagcagcttagttccctggtaacctcgagatgctgatgagacagagcagagcagagggaaccctctccctccatatcccatcctccaaaatgtgtcccttgatgtggatgggtagacaggattcctgccctggcagccagacccctgccttgggtctgcacctcctctccctccttcctctccccgtcatccctaaatcttgtcctcgagccactgccaccctgtgtaaaccctcatgtccagtcttgggggtgccatcccttctctttaaagctgaatggaccaaacatacccattgagtgttgggtggggacatctctggaaagtcagcacctggaccagctccacccctctctgaggacaccttctttccctttcagaacaaagaacagccaccatgcagctcttcctcctcttgtgcctggtgcttctcagccctcagggggcctcccttcaccgccaccacccccgggagatgaagaagagagtcgaggacctccatgtaggtgccacggtggcccccagcagcagaagggactttacctttgacctctacagggccttggcttccgctgcccccagccagaacatcttcttctcccctgtgagcatctccatgagcctggccatgctctccctgggggctgggtccagcacaaagatgcagatcctggagggcctgggcctcaacctccagaaaagctcagagaaggagctgcacagaggctttcagcagctccttcaggaactcaaccagcccagagatggcttccagctgagcctcggcaatgcccttttcaccgacctggtggtagacctgcaggacaccttcgtaagtgccatgaagacgctgtacctggcagacactttccccaccaactttagggactctgcaggggccatgaagcagatcaatgattatgtggcaaagcaaacgaagggcaagattgtggacttgcttaagaacctcgatagcaatgcggtcgtgatcatggtgaattacatcttctttaaaggtaaggcccttgggcccaaacctgcactttctttggcttttctgctgcttttatctaaagaatacccaattccctcacatacataaaagacggggagtacgttaagttcttttgggtgcctgttgagaaaaattaagtaaacaagcagccagagaaggtaagatgaatgccttcttgctgtggatgggattagtgaggctgagatgctgtttcctccacggaggaagagctggttgctgtcttcgggcccctggggacatctgaagccccagctttctacaggctctgaagtatgaacccattgtggccaccatggcaaagacaccaacaccttagccactcagggcaggacacagaccccagaagggcttaaagggcatttcccagtcccccgtatccctcagatcttggcccctctgccctcatagaggccaagactccctcagacaaatgcttgttcctctgaaatgcctcctcctgactcctcagcaagagctgacctctgcttatctccccgacactccttgtaagcattcctgctcgcctctgcagctcctgccagttgctgaccctggggaaagcaagagtggatagagaggagaagagaggagaggagagggtgggaagggttgcgaaggaaggtaaattgttaacacctccccttcctatggtcacagatcatgagtatctttggccatttgggtggctataacaaaataccataaactgggtggcttagcaacaacaaacatatatttctcatagttctggaggctgagaagtccaggatcaaggcactggcagatgcagtgcccattccttggttcatagagagtgccttcttagtatatccttgctggaaggaggaaggcagctctctgtggtctcttttgtaaggacaccgatcctgttcatgacagctccacccccatgacctaatcaactcccaaaggccccctgtcctaataccaccaccttgggggttaggtttcaacatatgaacaatgtggggacacaaacattgagaccacagcagtgagtgtcgaacttggactctgagatttcctatcccctggtgcagggcagtccccattacaccagattgctgagggcagctgggaaataagctaaggacggtattgactggggtcttccttcgataacgattaagaagttggaaacaggccaggcatggtggctcacgcctataatcccaacattttaggaggccgagatgggcagatcacctgaggtcaggagttcgagatcagcctggccaacatagtgaaaccccgtctctactaaaaaatacagaaattagccaggcatggtggtgggcgcctgtaattccagctacttgggaggctgaggcaggagaatcacttgaacctgggaggtgggggctgtagtgagccaaaattgcgccactgcactccagcatgggtcacagagcgagactccatctcaaaaagaagaaaaaaagaaaaaaaagaaaaaaagaaataaaataaaataaaaagaagttggaaacaatcacttgtagcgttttgttcagaagttcccataggaaggtcagagaagggtcattgaagacttcccaatgggaaaaaccattcatttccaggatccatactaacttctttctaaaatttaaatcaaaatattggaatgaaagtgcaaacagagaagttcacccagatatcaggtagcattcacagccagccacatttttcaccctcttcacttggagatttggtcttgagtaaaacgttagagaatcagagaacatcagggatccagggcctctgaagatgtgaaaaccaacctccttgttttgcaaatgtggaaggaaaagtcccacgaaaagtccaagaatgtgcccaatgttataaagagacttgccttcatattcaagaggttcaacagtcactgctctggggctgccataaagatggtctccgctggctatctttactgtcttcactccttttatttgcagctgagaatttctaattctgacacaaaattctttttcatttttcccttttttcatctttagctaagtgggagacaagcttcaaccacaaaggcacccaagagcaagacttctacgtgacctcggagactgtggtgcgggtacccatgatgagccgcgaggatcagtatcactacctcctggaccggaacctctcctgcagggtggtgggggtcccctaccaaggcaatgccacggctttgttcattctccccagtgagggaaagatgcagcaggtggagaatggactgagtgagaaaacgctgaggaagtggcttaagatgttcaaaaagaggtactttcagactaccccagggccagcctaaacccacacagccccagggagacacacacgccctaccagggccacacagcactggtgggaaggactcacccagccaaggagctgcctccaggcccagaggcatcctgtgacatccaagtcctgggggcctagcccagttggagggacaagagctggaaactgggttccttagggtggtgccagagtgggcagagacctctgggcagcccacgtccaagtccagagcaaggggaggctcatcctagaaaagaggccagaggagccataaccaccattgttccttgggttaaggagtccttttttaaaaccatcaaaactaagaatccagtgcattatgaatccaaggggtgaggctcagtgtgccaatgccccagaacagtctaagaaagctccttttccctttccaggcagctcgagctttaccttcccaaattctccattgagggctcctatcagctggagaaagtcctccccagtctggggatcagtaacgtcttcacctcccatgctgatctgtccggcatcagcaaccactcaaatatccaggtgtctgaggtgggttcagaagctcctatgcatctgcttcccaagatctattctgttctattctttctattctactctaccccatttcattccattccattccactcaactccactccactccactccactccagttcactctattcaattccactccactccagttcactctattcaattccactccactccactccagttcactctattcagttccactccactccactccactccactccagttcactctattccattccactccattccactcctccactcctctcatccactccactctactcctccactccacatctccactccactcctccactccactcctccactccactcatccactccactcctccactccactcctccactccactcctccactccactccactcatccactccactcttccattccactccattccactcctccactccactcttccactccactccattccactcctccactccactccactctattctattctattccattccattctactctattctattccattccattgcagtcaactccactccactctctactattctattccactcctctcccctccactccattccattgcagtccactccactgcactccactcctttattctgttctgttctattctattctattctattctattctctccctctccctctcttttcccacaagtagtgaaagtttcactttgtgtcttatccttcatgtaatgggaagccatatccaccactgttccttgagttaaggagtcctgttttaaacaatcaaaactaagaaggcacttcctagctatgtgatctccaaaaaatacttgactctctgagcttcctttctctcttctataaaattgaagaattacaccttgctcaaagatgccatgagaattcaatgacagacacatgcgaagtcaccccccagcacagtgcctggggcagagtagctgctccattgttccatttcctacttgctccatggctcagttgaacagatacttagaggttgatgcccataggcagaagctttgccatttgctatgatgacttcacctgcccctggtggcctggtgatgcctggtgtctcccctgcagatggtgcacaaagctgtggtggaggtggacgagtcgggaaccagagcagcggcagccacggggacaatcttcactttcaggtcggcccgcctgaactctcagaggctagtgttcaacaggccctttctgatgttcattgtggataacaacatcctcttccttggcaaagtgaaccgcccctgaggtggggcttctcctgaaatctacaggcctcagggtgggagatgaagggggctatgctatggcccatctgtatgctggtagctagtgatttacacaggtttagttgactaatgaggcattacaaataatattactctatgatgattgcttccacccacacgactgcaacatacaggtgccttggggaaatgtggagaacattcaatcttgccgtcactattcatcaatgaagattagcactgagatccagagaggctggatgacttgctcaagttcaccagcatggtagtggcaaagagaggtccagagtcctggcccttgatgcccagctcagtgccacaaagctcagtaggagggatgttccagtggatgagggccaccaggaagcacaggtccaaggctggtcccacacttatcagcagcaacaactgtcagttcatcctgcatgggaaaaatgttggaatgggagtctgaaatggggctactgtttcagtcctaacgtgctgtgtgacattgggacaacactttccctctctggacctcagtttccctctgtatacaaggatcagattcttgctgtgacccaagaactcctgaaatcatatagaaaggctggggtgggccctgtcattcgtggttgatttcaatacactcaagtgccattcatcctttaagaaaaacatctggatatcaaggtggaaatggcccatttaatgattgattatatcattttgtggatatagttataatctgatgggcctggctgggagtggaagaagggaagccttttgcaaatagtagagtgtcagttgcaggtgccaatgactaactttttgaattctatgttggcattaacaataaagcattttgcaaacactggttataactgtctttatggaggcagctctgggaatggtgacattgatagcttaccatgctccaggccgggtgcctggcccttcacctggatggtcgcatttgcccctcataagactcccatgaagaaaggcaccactattatcccatctgttattcacagatgggaaaggcaaggcttgaagtggttaggtggcttacccagtcacatatcttctaagtggtgcagccagaatttggcggggggagtgcgaccaagaaccctacactcagtcctgtgctctgtgctgtggaggagagatgaccaggagcagaaacttcattcaggggcatctcaggcaccagctcccccatgagccagctaagttccctccctcccttcaccaagcaccatgtgtttcctcatgtgccaaatgaagaggattagatactcaagaatggaatgagtgggtgagtgagtccttcgctgcacccaagtctgattttctgtgcgcctgctcaccccaccctgcatgttctaagcatgcttccataaggctgtgccccaccctctgattctagagtctggactgtatcagaggtgagtgcctactagaggtaacaaggtcaggaccccaaaccttgtccatcccccaaagtactgagcccccaccatgcaccagcccatgccagatgctttgcacttgtgatatcacccatcccttgacaacccagcaagttctattattgttcccattttacaggcaataacataagtgctttcccagggtcccacgctggtgacagtgagggcccagggtctgagagcccagatcgcacatgtgcgggctggtggcaggggagatggcagcaaccagactcagacatttctctgcagttgtgctgtgggctcagggtggctctttacgaaggggccccttcgtggggtcatgcactcctgtgtgctttcccttgcatcatgccttgcctgtcttggcaaatatttctctggagtttacccagccagtccaaggtcacagggaagccctgtctgtgtctcacacagaaggtcaacgtccagcactgtccaaactttactcagcaaacagtcacaaagcagctcctgtgtgggggtcggggtggctcactgtggtctctgctgcatgtcacacattgaagcactgtgctggggtcatcgcaggctgtttaactcaattgtcacatgagcctgggtgcacaaaatggtagagcagctcagagagagatggacagacagcatgaacctctgaggagtcaggttttcttggatgaagggacactaagatggctttggagcgtgagaaggacctcacctagcaaatgtgggaaaggagtgagacctccaggcagagggactggctggagacgagcgtgatgtggtgagccatggagtgtatgggtccccacagaacttcagtctgggcctgcacagggcatgtggaggagacaaggaggagggaggtcggtgccggcggttcagtgacagagatcctaaatgggaggccagtgttttgtctgatctctttcatcccaatttcagggtagtttggtcatccacgccacattccaagtgtcccctgggccctttctctccctcacccccctgtctgcacatgagtagatgcctccacgcagccctcccaggacgctcacctctatccacagatgcttctccaaaacccaccaggccctcccatggaacgagctcacctacagggtaaaatcaggtcacggtcacatataggcctgactactcccctcaggaccctcattcacagccactgtattaatttgctggggctgccaaaacaaagtgtcctcatctgggaggctgcagtagatttgctgaaattgatttgctagcgttgctgaaattgattcaagctt

SEQ ID NO: 6594 - DNA, 14770 bp, Homo sapiens; identical to SEQ ID NO: 230
  misc_feature (1)..(14770): n=a,t,g or c

SEQ ID NO: 6595 - DNA, 7720 bp, Homo sapiens; identical to SEQ ID NO: 3973
  misc_feature (1)..(7720): n=a,t,g or c

SEQ ID NO: 6596 - DNA, 662 bp, Homo sapiens; identical to SEQ ID NO: 2432
  misc_feature (1)..(662): n=a,t,g or c

SEQ ID NO: 6597 - DNA, 1280 bp, Homo sapiens
  misc_feature (1)..(1280): n=a,t,g or c
tgccgcagcccccgcccgcccgcagagcttttgaaaggcggcgggaggcggcgagcgccatggccagtccgggctgcctgctgtgcgtgctgggcctgctactctgcggggcggcgagcctcgagctgtctagaccccacggcgacaccgccaagaagcccatcatcggaatattaatgcaaaaatgccgtaataaagtcatgaaaaactatggaagatactatattgctgcgtcctatgtaaagtacttggagtctgcaggtgcgagagttgtaccagtaaggctggatcttacagagaaagactatgaaatacttttcaaatctattaatggaatccttttccctggaggaagtgttgacctcagacgctcagattatgctaaagtggccaaaatattttataacttgtccatacagagttttgatgatggagactattttcctgtgtggggcacatgccttggatttgaagagctttcactgctgattagtggagagtgcttattaactgccacagatactgttgacgtggcaatgccgctgaacttcactggaggtcaattgcacagcagaatgttccagaattttcctactgagttgttgctgtcattagcagtagaacctctgactgccaatttccataagtggagcctctccgtgaagaattttacaatgaatgaaaagttaaagaagtttttcaatgtcttaactacaaatacagatggcaagattgagtttatttcaacaatggaaggatataagtatccagtatatggtgtccagtggcatccagagaaagcaccttatgagtggaagaatttggatggcatttcccatgcacctaatgctgtgaaaaccgcattttatttagcagagttttttgttaatgaagctcggaaaaacaaccatcattttaaatctgaatctgaagaggagaaagcattgatttatcagttcagtccaatttatactggaaatatttcttcatttcagcaatgttacatatttgattgaaagtcttcaatttgttaacagagcaaatttgaataattccatgattaaactgttagaataacttgctactcatggcaagattaggaagtcacagattcttttctataatgtgcctggctctgattcttcattatgtatgtgactatttatataacattagataattaaatagtgagacataaatagagtgctttttcatggaaaagccttcttatatctgaagattgaaaaataaatttactgaaatacaaaaaaaaaaaaaaa

SEQ ID NO: 6598 - DNA, 3362 bp, Homo sapiens
  misc_feature (1)..(3362): n=a,t,g or c
aaaaaatcaattttggaagatgtcactgaacaactcttccaatgtatttctggattcagtgcccagtaataccaatcgctttcaagttagtgtcataaatgagaaccatgagagcagtgcagctgcagatgacaatactgacccaccacattatgaagaaacctcttttggggatgaagctcagaaaagactcagaatcagctttaggcctgggaatcaggagtgctatgacaatttcctccacagtggagaaactgctaaaacagatgccagttttcacgcttatgattctcacacaaacacatactatctacaaacttttggccacaacaccatggatgccgttcccaagatagagtactatcgtaacaccggcagcatcagtgggcccaaggtcaaccgacccagcctgcttgagattcacgagcaactcgcaaagaatgtggcagtcaccccaagttcagctgacagagttgctaacggtgatgggatacctggagatgaacaagctgaaaataaggaagatgatcaagctggtgttgtgaagtttggatgggtgaaaggtgtgctggtaagatgcatgctgaacatctggggagtcatgctcttcattcgcctctcctggattgttggagaagctggaattggtcttggagttatcatcattggcctatccaccatagtaacgacaatcacaggtatgtccacgtctgctattgccacgaacggagttgttagaggaggtggggcctactatcttatttccagaagtttagggcccgagttcggtgggtcaataggcctgatctttgcttttgctaatgcagtggctgttgctatgtatgtggtgggattcgctgaaactgtagtagatctacttaaggagagtgattcgatgatggtggatccaaccaatgacatccggattataggctccatcacagtggtgattcttctaggaatttcagtagctggaatggaatgggaggcaaaggcccaagtcattcttctggtcattcttctaattgctattgcaaacttcttcattggaactgtcattccatccaacaatgagaaaaagtccagaggtttctttaattaccaagcatcaatatttgcagaaaactttgggccacgcttcacaaagggtgaaggcttcttctctgtctttgccatttttttcccagcagctactgggattcttgctggtgccaatatctcaggagatttggaggatccccaagatgccatccccagaggaaccatgctggccattttcatcaccactgttgcctacttaggggttgcaatttgtgtaggggcctgtgtggtccgagatgccaccgggaacatgaatgacaccatcatttctgggatgaactgcaatggttcagcagcatgtgggttgggctatgacttctcaagatgtcgacatgaaccatgtcagtacgggctgatgaacaatttccaggtcatgagcatggtatcagggttcggccccctcatcactgcgggaatcttttctgcaacactctcctccgccctggcctcccttgtcagcgcacccaaagtgttccaggctctgtgcaaggacaacatctacaaagccctgcagttttttgcaaagggatatgggaaaaacaatgaacccctgagaggatatattctcacttttcttatagccatggcatttattcttattgcggaactgaacaccattgctcccatcatctccaactttttcctggcctcatatgcacttattaatttctcctgcttccatgcctcttatgccaaatctccaggatggagacctgcgtatggaatttacaacatgtgggtatctctttttggagctgttttgtgctgtgcagtcatgtttgtcatcaactggtgggcagctgtcatcacctatgtcattgaattcttcctttacgtctatgtgacttgtaagaagccagatgtgaactggggctcctccacacaggctctttcctacgtgagtgctttagacaatgctctggaattaaccacagtggaagaccacgtaaaaaacttcaggccccagtgcattgtcttaacagggggacccatgacaagacctgctctcctggacataactcacgcctttaccaagaacagtggcctttgcatctgctgtgaagtctttgtgggaccgcgcaaactgtgtgttaaggagatgaacagtggcatggcgaaaaaacaggcctggcttataaagaacaaaatcaaggctttttatgctgcagtggcggcagactgtttcagggatggtgtccgaagtcttcttcaggcctcaggcttaggaagaatgaaaccaaacactctggtgattggatataagaaaaactggaggaaagctcccttgacagagattgagaactacgtgggaatcatacatgatgcatttgattttgagattggcgtggttatagtcagaatcagccaaggatttgacatctctcaggttcttcaggtgcaagaggaattagagagattagaacaggagagactagcattggaagcgactatcaaagataatgagtgtgaagaggaaagtggaggcatccgaggcttgtttaaaaaagctggcaagttgaacattactaagacaacgcctaaaaaagatggcagcattaacacaagccagtcgatgcatgtgggagagttcaaccagaaactggtggaagccagcactcaatttaaaaagaaacaagaaaaaggcacaattgatgtttggtggttgtttgatgatggagggttaacacttcttatcccctatatcttaactctcagaaaaaaatggaaagactgtaaattaagaatctatgtgggagggaagatcaaccgcattgaagaagaaaaaattgcaatggcttcccttctgagcaaatttaggataaaatttgcagacatccatatcatcggtgacatcaacattaggccaaacaaagagagctggaaagtctttgaagagatgattgaaccatatcgtctccatgaaagctgcaaagatttaacaactgctgagaaattaaaaagagaaactccgtggaaaattacagatgcagaactggaagcagtcaaggaaaagagttaccgccaagttcgactgaatgaactcttacaggagcactccagagctgctaatctcattgtcctgagccttcccgtggcaagaaagggatccatatcggatttgttgtatatggcttggttggaaatcctcacaaagaacctcccacctgtcttactagttagaggaaatcacaaaaatgtcttgacattttactcttaaaacatgaaagattggaatacattttaacttaatgtaatgcata

SEQ ID NO: 6599 - DNA, 62944 bp, Homo sapiens; identical to SEQ ID NO: 5284
  misc_feature (1)..(62944): n=a,t,g or c

SEQ ID NO: 6600 - DNA, 882 bp, Homo sapiens
  misc_feature (1)..(882): n=a,t,g or c
cggccaggcttgcgcgtggttcccctcccggtgggcggattcctgggcaagatgaagtgggtgtgggcgctcttgctgttggcggcgtgggcagcggccgagcgcgactgccgagtgagcagcttccgagtcaaggagaacttcgacaaggctcgcttctctgggacctggtacgccatggccaagaaggaccccgagggcctctttctgcaggacaacatcgtcgcggagttctcggtggacgagaccggccagatgagcgccacagccaagggccgagtccgtcttttgaataactgggacgtgtgcgcagacatggtgggcaccttcacagacaccgaggaccctgccaagttcaagatgaagtactggggcgtagcctcctttctgcagaaaggaaatgatgaccactggatcgtcgacacagactacgacacgtatgccgtacagtactcctgccgcctcctgaacctcgatggcacctgtgctgacagctactccttcgtgttttcccgggaccccaacggcctgcccccagaagcgcagaagattgtaaggcagcggcaggaggagctgtgcctggccaggcagtacaggctgatcgtccacaacggttactgcgatggcagatcagaaagaaaccttttgtagcaatatcaagaatctagtttcatctgagaacttctgattagctctcagtcttcagctctatttatcttaggagtttaatttgcccttctctccccatcttccctcagttcccataaaaccttcattacacataaagatacacgtgggggtcagtgaatctgcttgcctttcctgaaagtttctggggcttaagattccagactctgattcattaaactatagtcacccgtg

SEQ ID NO: 6601 - DNA, 1558 bp, Homo sapiens; identical to SEQ ID NO: 6000
  misc_feature (1)..(1558): n=a,t,g or c

SEQ ID NO: 6602 - DNA, 1642 bp, Homo sapiens
  misc_feature (1)..(1642): n=a,t,g or c
cggactggtggctggtctgcagggttgacctgcgcaatgcagaggctgcaggtagtgctgggccacctgaggggtccggccgattccggctggatgccgcaggccgcgccttgcctgagcggtgccccgcaggcctcggccgcggacgtggtggtggtgcacgggcggcgcacggccatctgccgggcgggccgcggcggcttcaaggacaccacccccgacgagcttctctcggcagtcatgaccgcggttctcaaggacgtgaatctgaggccggaacagctgggggacatctgtgtcggaaatgtgctgcagcctggggccggggcaatcatggcccgaatcgcccagtttctgagtgacatcccggagactgtgcctttgtccactgtcaatagacagtgttcgtcggggctacaggcagtggccagcatagcaggtggcatcagaaatgggtcttatgacattggcatggcctgtggggtggagtccatgtccctggctgacagagggaaccctggaaatattacttcgcgcttgatggagaaggagaaggccagagattgcctgattcctatggggataacctctgagaatgtggctgagcggtttggcatttcacgggagaagcaggatacctttgccctggcttcccagcagaaggcagcaagagcccagagcaagggctgtttccaagctgagattgtgcctgtgaccaccacggtccatgatgacaagggcaccaagaggagcatcactgtgacccaggatgagggtatccgccccagcaccaccatggagggcctggccaaactgaagcctgccttcaagaaagatggttctaccacagctggaaactctagccaggtgagtgatggggcagctgccatcctgctggcccggaggtccaaggcagaagagttgggccttcccatccttggggtcctgaggtcttatgcagtggttggggtcccacctgacatcatgggcattggacctgcctatgccatcccagtagctttgcaaaaagcagggctgacagtgagtgacgtggacatcttcgagatcaatgaggcctttgcaagccaggctgcctactgtgtggagaagctacgactcccccctgagaaggtgaaccccctggggggtgcagtggccttagggcacccactgggctgcactggggcacgacaggtcatcacgctgctcaatgagctgaagcgccgtgggaagagggcatacggagtggtgtccatgtgcatcgggactggaatgggagccgctgccgtctttgaataccctgggaactgagtgaggtcccaggctggaggcgctacgcagacagtcctgctgctctagcagcaaggcagtaacaccacaaaagcaaaaccacatgggaaaactcagcactggtggtggtggcagtggacagatcaaggcacttcaactcatttggaaaatgtgaacactgatgacatggtataggagtgggtggggtgttgagccacccatcagaccctctttagctgtgcaagataaaagcagcctgggtcacccaggccacaaggccatggttaattcttaaggcaaggcaaatccatggatgagaagtgcaatgggcatagtaaaagtgcatgaattt

SEQ ID NO: 6603 - DNA, 3658 bp, Homo sapiens
  misc_feature (1)..(3658): n=a,t,g or c
tgaggactcttagaagtgctcttatcagtagcatcttaattactttacaatggattttaaatggaaaggaagtttacaataatagcaaatgcatattgacagctctttagtgcccggtgctgttctaagtccttatgactaccctgtgaaataagttccaccatgaccccaattttcctgaaaaggagactgaggcatggagagctttagtattttgcccaatgtcacacagctagtaaatggggacccccatgtgaaactactcactgattgtcctactctcttgtggttttatctttttagcagacaccaaatgaggaatgtttgttcctggaaaggctggaggagaaccattacaacacctatatatccaagaagcatgcagagaagaattggtttgttggcctcaagaagaatgggagctgcaaacgcggtcctcggactcactatggccagaaagcaatcttgtttctccccctgccagtctcttctgattaaagagatctgttctgggtgttgaccactccagagaagtttcgaggggtcctcacctggttgacccaaaaatgttcccttgaccattggctgcgctaacccccagcccacagagcctgaatttgtaagcaacttgcttctaaatgcccagttcacttctttgcagagccttttacccctgcacagtttagaacagagggaccaaattgcttctaggagtcaactggctggccagtctgggtctgggtttggatctccaattgcctcttgcaggctgagtccctcaatgcaaaagtggggctaaatgaagtgtgttaaggggtcagctaagtgggacattagtaactgcacactatttccctctactgagtaaaccctatctgtgattcccccaaacatctggcatggctcccttttgtccttcctgtgccctgcaaatattagcaaagaagcttcatgccaggttaggaaggcagcattccatgaccagaaacagggacaaagaaatccccccttcagaacagaggcatttaaaatggaaaagagagattggattttggtgggtaacttagaaggatggcatctccatgtagaataaatgaagaaagggaggcccagccgcaggaaggcagaataaatccttgggagtcattaccacgccttgaccttcccaaggttactcagcagcagagagccctgggtgacttcaggtggagagcactagaagtggtttcctgataacaagcaaggatatcagagctgggaaattcatgtgcatctggggactgagtgtgggagtgcagagaaagaaagggaaactggctgaggggataccataaaaagaggatgatttcagaaggagaaggaaaaagaaagtaatgccacacattgtgcttggcccctggtaagcagaggctttggggtcctagcccagtgcttctccaacactgaagtgcttgcagatcatctggggacctggtttgaatggagattctgattcagtgggttgggggcagagtttctgcagttccatcaggtcccccccaggtgcaggtgctgacaatactgctgccttacccgccatacattaaggagcagggtcctggtcctaaagagttattcaaatgaaggtggttcgacgccccgaacctcacctgacctcaactaacccttaaaaatgcacacctcatgagtctacctgagcattcaggcagcactgacaatagttatgcctgtactaaggagcatgattttaagatgctttggcccaatgcctataaaatgcccatttcgaagatatacaaaaacatacttcaaaaatgttaaacccttaccaacagcttttcccaggagaccgtttgtattaccattacttgtataaatacacttcctgcttaaacttgacccaggtggctagcaaattagaaacaccattcatctctaacatatgatactgatgccatgtaaaggcctttaataagtcattgaaatttactgtgagactgtatcttttaattgcatttaaaaatatatagcttgaaagcagttaaactgattagtattcaggcactgagaatgatagtaataggatacaatgtataagctactcacttatctgatacttatttacctataaaatgagatttttgttttccactgtgctattacaaattttcttttgaaagtaggaactcttaagcaatggtaattgtgaataaaaattgatgagagtgttagctcctgtttcatatgaaattgaagtaattgttaactaaaaacaattccttagtaactgaactgtcatatttagaatggaaggaaaatgacagtttgtgaaagttcaaagcaatagtgcaattgaagaattgacctaagtaagctgacattatggttaataatagtattttagatttgtgcagcaaaataatttcataacttttttgtttttgttacttggataagatcaatctgttttattttagtaaatctttgcaggcaagttagagaaaatgcagtgtggcttaacgtctctttagtatgaagatttggccagaaaaagatacccagagaggaaatctaagataattataatggtccatactttttattgtatgaatcaaactcaagcataacattggccaaggaaaattaaataccattgctaacttgtgaaatggaagtctgtgatttcggagatgcaaagcattgtagtaaaaacaccaatgtgacctcgaccatctcagcccagatatcattcatatatctgttcaatgactattaaggtgcctactgtgtgctaggcactgtactggatactggggaccttgtctgtctggtttgctgctgtatcttctcccagggcattatatttatgatgaaagatgctgtggattcaattctttcagtcaagaataaacacagactttgtaggttcctgctgaataaagcaaatcccagaaacccagattttggaagaatcagcaacccccagcataaaataaacccctatcaaaatgtcagaggacatggcaaggtaaacttagcattttcaactttagaaccgggtcagcttcagggggactgctttcaaatcagccaaagagcctgtcagatcttcttagaaggaagaggttggtagttccctgctctgttttgaacatgctctagtttattaacctggggacattcccattgctgtcttaagtaagtctcatagccagctcctgtcacgtgactctcatatggattcattttcgggccagctctgaacaaagcatcatgaacatatgtgcttttggtcgtttgcaatgtgatggtggtggaggtaggtattggtttccttggaaggcatgataagaaagattcacaatggccaacagtgtgtatgaacaaaaaactgattggagcatcagctagtactgaaggtccttgctttgtgtcagaggcaaaggaacccaaggcgccaagtcctcagccttgagtgtactgctgacaactaaactcacaggctgcaaagcagacctctgatgaagatgcctgttatttcacatcactgtctttttgtgtatcatagtctgcaccttacaaatattaataaatgttccaataataggtgataatgtctctgagtttctgagcatcctgctgcctcatctttctatca

SEQ ID NO: 6604 - DNA, 1195 bp, Homo sapiens
  misc_feature (1)..(1195): n=a,t,g or c
cctggggacaatgtgggcttcaatgtcaagaatgttgcctgtcctgctgtctctgctgctgcttctgggtcctgctgtcccccaggagaaccaagatggtcgttactctctgacctatatctacactgggctgtccaagcatgttgaagacgtccccgcgtttcaggcccttggctcactcaatgacctccagttctttagatacaacagtaaagacaggaagtctcagcccatgggactctggagacaggtggaaggaatggaggattggaagcaggacagccaacttcagaaggccagggaggacatctttatggagaccctgaaagacattgtggagtattacaacgacagtaacgggtctcacgtattgcagggaaggtttggttgtgagatcgagaataacagaagcagcggagcattctggaaatattactatgatggaaaggactacattgaattcaacaaagaaatcccagcctgggtccccttcgacccagcagcccagataaccaagcagaagtgggaggcagaaccagtctacgtgcagcgggccaaggcttacctggaggaggagtgccctgcgactctgcggaaatacctgaaatacagcaaaaatatcctggaccggcaagatcctccctctgtggtggtcaccagccaccaggccccaggagaaaagaagaaactgaagtgcctggcctacgacttctacccagggaaaattgatgtgcactggactcgggccggcgaggtgcaggagcctgagttacggggagatgttcttcacaatggaaatggcacttaccagtcctgggtggtggtggcagtgcccccgcaggacacagccccctactcctgccacgtgcagcacagcagcctggcccagcccctcgtggtgccctgggaggccagctaggaagcaagggttggaggcaatgtgggatctcagacccagtagctgcccttcctgcctgatgtgggagctgaaccacagaaatcacagtcaatggatccacaaggcctgaggagcagtgtggggggacagacaggaggtggatttggagaccgaagactgggatgcctgtcttgagtagacttggacccaaaaaatcatctcaccttgagcccacccccaccccattgtctaatctgtagaagctaataaataatcatccctccttaaaaaaaaaaa

SEQ ID NO: 6605 - DNA, 4211 bp, Homo sapiens
  misc_feature (1)..(4211): n=a,t,g or c
cccctccctggacacccaggcgacaatggcagaactgcccacaacagagacgcctggggacgccactttgtgcagcgggcgcttcaccatcagcacactgctgagcagtgatgagccctctccaccagctgcctatgacagcagccaccccagccacctgacccacagcagcaccttctgcatgcgcacctttggctataacacgatcgatgtggtgcccacatatgagcactatgccaacagcacccagcctggtgagccccggaaggtccggcccacactggctgacctgcactccttcctcaagcaggaaggcagacacctgcatgccctggcctttgacagccggcccagccacgagatgactgatgggctggtggagggcgaggcaggcaccagcagcgagaagaaccccgaggagccagtgcgcttcggctgggtcaagggggtgatgattcgttgcatgctcaacatttggggcgtgatcctctacctgcggctgccctggattacggcccaggcaggcatcgtcctgacctggatcatcatcctgctgtcggtcacggtgacctccatcacaggcctctccatctcagccatctccaccaatggcaaggtcaagtcaggtggcacctacttcctcatctcccggagtctgggcccagagcttgggggctccatcggcctcattttcgctttcgccaatgccgtgggtgtggccatgcacacggtgggctttgcagagaccgtgcgggacctgctccaggagtatggggcacccatcgtggaccccattaacgacatccgcatcattggcgtggtctcggtcactgtgctgctggccatctccctggctggcatggagtgggagtccaaggcccaggtgctgttcttccttgtcatcatggtctcctttgccaactatttagtggggacgctgatccccccatctgaggacaaggcctccaaaggcttcttcagctaccgggcggacatttttgtccagaacttggtgcctgactggcggggtccagatggcaccttcttcggaatgttctccatcttcttcccctcggccacaggcatcctggcaggggccaacatatctggtgacctcaaggaccctgctatagccatccccaaggggaccctcatggccattttctggacgaccatttcctacctggccatctcagccaccattggctcctgcgtggtgcgtgatgcctctggggtcctgaatgacacagtgacccctggctggggtgcctgcgaggggctggcctgcagctatggctggaacttcaccgagtgcacccagcagcacagctgccactacggcctcatcaactattaccagaccatgagcatggtgtcaggcttcgcgcccctgatcacggtggtcatcttcggggccaccctctcctctgccctggcctgccttgtctctgctgccaaagtcttccagtgcctttgcgaggaccagctgtacccactgatcggcttcttcggcaaaggctatggcaagaacaaggagcccgtgcgtggctacctgctggcctacgccatcgctgtggccttcatcatcatcgctgagctcaacaccatagcccccatcatttccaacttcttcctctgctcctatgccctcatcaacttcagctgcttccacgcctccatcaccaactcgcctgggtggagaccttcattccaatactacaacaagtgggcggcgctgtttggggctatcatctccgtggtcatcatgttcctcctcacctggtgggcggccctcatcgccattggcgtggtgctcttcctcctgctctatgtcatctacaagaagccagaggtaaattggggctcctcggtacaggctggctcctacaacctggccctcagctactcggtgggcctcaatgaggtggaagaccacatcaagaactatcgcccccagtgcctggtgctcacggggccccccaacttccgcccggccctggtggactttgtgggcaccttcacccggaacctcagcctgatgatctgtggccacgtgctcatcggaccccacaagcagaggatgcctgagctccagctcatcgccaacgggcacaccaagtggctgaacaagaggaagatcaaggccttctactcggatgtcattgccgaggacctccgcagaggcgtccagatcctcatgcaggccgcaggtctcgggagaatgaagcccaacattctggtggttgggttcaagaagaactggcagtcggctcacccggccacagtggaagactacattggcatcctccatgatgcctttgatttcaactatggcgtgtgtgtcatgaggatgcgggagggactcaacgtgtccaagatgatgcaggcgcacattaaccccgtgtttgacccagcggaggacgggaaggaagccagcgccagagtggaccccaaggccctggtgaaggaggagcaggccaccaccatcttccagtcggagcagggcaagaagaccatagacatctactggctctttgacgatggaggcctcaccctcctcattccctatctccttggccgcaagaggaggtggagcaaatgcaagatccgtgtgttcgtaggcggccagattaacaggatggaccaggagagaaaggcgatcatttctctgctgagcaagttccgactgggattccatgaagtccacatcctccctgacatcaaccagaaccctcgggctgagcacaccaagaggtttgaggacatgattgcacccttccgtctgaatgatggcttcaaggatgaggccactgtcaacgagatgcggcgggactgcccctggaagatctcagatgaggagattacgaagaacagagtcaagtcccttcggcaggtgaggctgaatgagattgtgctggattactcccgagacgctgctctcatcgtcatcactttgcccatagggaggaaggggaagtgccccagctcgctgtacatggcctggctggagaccctgtcccaggacctcagacctccagtcatcctgatccgaggaaaccaggaaaacgtgctcaccttttactgccagtaactccaggctttgacatccctgtccacagctctgagtgtgtgggataagttggaacttgattgcctctagtccacagggatgagactcatgttctgttgcactttaagtggcagcatctgatgatctcacccgaaaaagatggtagatttccaaatctggctggactccacttccatgggacacattccctgggtcttgtgtttatgggctagagaaatagcagatggagctgcaaggaaaactctctaaagcatcctattccttttaaaggatttcttttgattttgatgaccattaattaagagttcagtctttgatttgtatgcaaattggagtcccaatgctgggcgtgaatcttgacagtttctacagaccttcctgggtgaaagttcctaaatcatgccttgcttcctccaataggagaatgggagcctcacctgtaggacctacaggctctctaaggaatgcaggtctctctctgagcctccacagccaggcaaatacatatatatatatttttttttagatgaagttttttctcttgttgcccaggctagggtgtaatggcatgatctcaggtcactgcaacctcctcccgggttcaagcatttcttctgtctcagcctcccgaatagctgggattacaggcacctgccatcacaccagctaatttttgtatttttagtagagatggggtttcaccatgttgaccaggctggtgttgagctcctgacctcaggtgatccacccacctcggtctcccaaagtgctggggttacaggcctgagccactgcgcccggcccaggcaaatttcttgaaccacttctcactcccgtcactttcaataaggggtctttgatgtcttcactggttctttggacgagggacttttcgaacttttttggttgcaacacacagtaagaaatatatttcacactgagacttgcagcgcacacacacggaaacgaccaaaacaaaaatgtcacaaaacaatacttacccttccctgggggacgtcctccagtatgttctgttctgtttatttttcactgttggttgcaatccaataaaatgactttgggatccactcatgggtggggacccacacatttgaaaccg

SEQ ID NO: 6606 - DNA, 403 bp, Homo sapiens
  misc_feature (1)..(403): n=a,t,g or c
gctaccatggtctccggcagcaacggcctcgccgccgcccgtctcctgtcgcgcagcttcctcctgcaacagaatggaattcagcattgttcctacacagcttctcggcaacatctctatgttgataaaaatacaaagattatttgccagggtttcactggcaaacagggcacctttcacagccagcaggcattggaatatggcaccaaactcgttggaggaaccactccagggaaaggaggccagacacatctgggcttacctgtctttaatactgtgaaggaggccaaagaacagacaggagcaacggcttctgtcatttatgttcctccgccttttgctgctgctgccattaatgaagctattgaggcagaaattcccttggttgtgtgtatcactgaag

SEQ ID NO: 6607 - DNA, 1236 bp, Homo sapiens; identical to SEQ ID NO: 158
  misc_feature (1)..(1236): n=a,t,g or c

SEQ ID NO: 6608 - DNA, 1763 bp, Homo sapiens
  misc_feature (1)..(1763): n=a,t,g or c
agagatccagcaggtgctgcaccatgagtgtctctgtgctgagccccagcagactcctgggtgatgtctctggaatcctccaagcggcctccctgctcattctgcttctgctgctgatcaaggcagttcagctctacctgcacaggcagtggctgctcaaagccctccagcagttcccgtgccctccctcccactggctcttcgggcacatccaggagctccaacaggaccaggagctacaacggattcagaaatgggtggagacattcccaagtgcctgtcctcattggctatggggaggcaaagttcgtgtccagctctatgaccctgactatatgaaggtgattctggggagatcagacccgaaatcccatggttcctacagattcctggctccatggattgggtacggcttgctcctgttgaatgggcagacatggttccagcatcgacggatgctgaccccagccttccactatgacatcctgaagccctatgtggggctcatggcagactctgtacgagtgatgctggacaaatgggaagagctccttggccaggattcccctctggaggtctttcagcacgtctccttgatgaccctggacaccatcatgaagtgtgccttcagccatcagggcagcatccaggtggacaggaattctcagtcctacatacaggccattagtgacctgaacaacctggttttttcccgtgtgaggaatgcctttcaccagaatgacaccatctacagcctgacctctgctggccgctggacacaccgcgcctgccagctgtcccatcagcacacgagacccaaagtgatccaactgaggaaggctcaactacagaaggagggggagctggagaagatcaagaggaagaggcatttggattttctggatatcctcctcttggccaaaatggagaatgggagcatcttgtcagacaaggacctccgtgctgaggtggacacgttcatgtttgagggccacgacaccacagccagtgggatctcctggatcctctatgctctggccacacaccccaagcatcaggagaggtgccgggaggagatccacagcctcctgggtgatggagcctccatcacctggaaccacctggaccagatgccctacaccaccatgtgcattaaggaggcactgaggctctacccaccggtgccaggcattggcagagagctcagcactcccgtcaccttccctgatgggcgctccttgcccaaaggtatcatggtcctcctctccatttatggccttcaccacaacccaaaagtgtggcccaacccagaggtgtttgaccctttccgttttgcaccgggttctgctcaacacagccacgctttcctgcccttctcaggaggatcaaggaactgcattgggaaacaatttgccatgaacgagctgaaggttggccagcaggccctgaccctcgtccgctttgagctgctgcctgatcccaccaggatccccatccccattgcacgacttgtgttgaaatccaaaaatggaatccacctgcgtctcaggaggctccctaacccttgtgaagacaaggaccagctttgagggcctccacctgccgtcctgtcttcctgacccccgcttctgtccccttcctgtctgcccatatcctgttttctgtctgcccatacacctgtctccttcttcctgcctgcttgtctgttcctatattagtttcctattactgctgtaataaactatcacaatctcagtgatttt

SEQ ID NO: 6609 - DNA, 3687 bp, Homo sapiens
  misc_feature (1)..(3687): n=a,t,g or c
acctccacctggctaggggagttgaacttggaggccgaaggctgacctcagctttgctctgaaacagattcgccacttgagagagagaggcctggagttcttatctgttccctccacgtactcattaagtgtggcctgagtagaatagcccggtcatgttcagttcttcctcgcgctgctgacctcatggcctagaagtctctgtcccaatgaattataaccaaactgagagtgtcctgtgtgccaggtctgttccaaagagcggtgcttatctcctttaatcccacccacactattctcgttccagtttacaaatgaggctcaaaggratatggtgattttcccaagtcacactgtatgtaacagagccaggatgcaaaccttctccggccgtgcctctcagagctatggaatacaacgctgtgacgcaaacaggactttggggccagtctccaaatgccccctcaaatttcctctaggcaagagttctggagccgccactgractccagccggccttggcttctgagctttggattctgggcagtaatggtcacattcccagcgtcctggaaaagcttgcccttggcttctggccctgactctgcctcccactgactagtggacgtcaactgcccctctctgggcctggcaacaccatcctgttcaatgaggctgcggctggatcagaggtccccaggcctggaaccttccagggctgggctcagctcccccaacccccatccccccaggtaggccaggaggctgggcgggacctgcttggggttaaatactccggcccagcactccccaggcctctagtcccagtaggaggtttgactaagatcaatcatggtaagtgccatggccatctccccttgggtgggacatcttcagtaacgcttccagaagcaccttgtgttggaacctccaagtctcactgtccttctttttctccttagacgacttacagtgacaaaggggcaaaggtaagcaggcgaaatgttgggaaatgtagggcacctcacctcttctctccttctgcagcctgagagaggccgattcctccacttccactctgtgaccttctgggttggcaacgccaagcaggtagaagccggggcaaggtgctggagtgagcagacggcagggcagagggctgcctgacaagggcaggcctccagcagggtctgtgattggcccttgggagggaggatcaggccaggggtgggccagatactctgaatcctaattacaccagcgggaaagttatctgtcagcaaaatgtgcaggcagcagtctatcttcccaggagggtctctgcccctgaggcaatagggcaggcaggctgaggggggccaggggctctcttgcggaagtcccccatgctggccccttgaccctcatgaaccctgctgcaaccctgtgattcaggccgcgtcattctactgcagcaagatgggctttgaacctctagcctacaggggcctggagaccggttcccgggaggtggtcagccatgtaatcaaacaagggaaggtgagtcaccacccccaggacactgggccactagcctcacctccttctcctatcttagattgtgtttgtcctctcctcagcgctcaacccctggaacaaaggtggaggtgcccggggagggtggacgcatggctctgtgggtgggatctgggttctggagggtggcgctaggctccgtgggtgggctctgggttcaggcctggatggagactaaaagccaggtgaggggacctagactccagactccagtgccatcctctccctgccggccacagagatgggcgatcacctggtgaaacacggtgacggagtgaaggacattgcgttcgaggtggaagattgtgactacatcgtgcaggtaagaaagcacctggagaaactggaggggcctgcagaaagcacgggaacggggcgccaaaatcatgcgggagccctgggtagagcaagacaagtttgggaaggtgaagtttgctgtgctgcagacggtgagttccctttggtgcccccacccctcctgctgtcggcaccactgccgagccaggctgttttccacccgtagtatggggacaccacacacaccctggtggagaagatgaactacatcggccaattcttgcctggatatgaggccccagcgttcatggaccccctacttcctaaactgtgagtgtccctcagggcagaggtgggtggaaagccttctcacccccatcttcttcccttcccaggcccaaatgcagtctggagatgatcgaccacattgtgggaaaccagcctgatcaggagatggtgtccgcctccgaatggtgagaccttgcccctctccctctgcgtgaagagcatatgtgttccaccgcccaccctacaggtacctgaaaaacctgcagttccaccgcttctggtccgtggatgacacgcaggtgcacacggaatatagctctctgcgatccattgtggtggccaactatgaagagtccatcaagatgcccatcaatgagccagcgcctggcaagaagaagtcccagatccaggtgaggccggccctggctggggragaggggcgcagggaagaggtctgggggctcttgtagggtcagggatgtgggtgatggggcaaatgacagtggtctccttgtttccctcccccaggaatatgtggactataacgggggcgctggggtccagcacatcgctctcaagaccgaagacatcatcacagcggttagaacccccttgcctgtgcgaattcctctctcatggaggccgaaggctgacctcagctttgctctgaaacagattcgccacttgagagagagaggcctggagttcttatctgttccctccacgtactacaaacaactgcgggagaagctgaagacggccaagatcaaggtgaaggagaacattgatgccctggaggtgaggcccaggcaggatccctcgagggatctcaccgtgcagttcccctagcagagcccctgtttcccgcctaggagctgaaaatcctggtggactacgacgagaaaggctacctcctgcagatcttcaccaaaccggtgcaggaccggcccacgctcttcctggaagtcatccagcgccacaaccaccaggtactgcttgtccccggcaggcccgaggggacaggcagctagcacactcggttttctgggtcctttgggtcatctcctctctttcccgccacagggttttggagccggcaacttcaactcactgttcaaggctttcgaggaggagcagaacctgcggggtaacctcaccaacatggagaccaatggggtggtgcccgggatgtaagcccccgcccaccccacggaggccacagccacacagccacgccccctgattctggaactcgcccaacttccctactggctgctccccttgggtcccgcccaccagcggactcggcccccaaggctccgcccacactgaccacgggcctcggcggggccgccctctgctccagccctcccgattaaagcgtgctccggtccaatactgtgtctgtgtttgtgttgcgcataaggcagtagtgcttatggcagccagggggaggccaggcaggccgccagcgccgcggcgaccgaggagctgcgggtgcgcagcgctttgccagcgggaccacgcg

SEQ ID NO: 6610 - DNA, 4892 bp, Homo sapiens; identical to SEQ ID NO: 690
  misc_feature (1)..(4892): n=a,t,g or c

SEQ ID NO: 6611 - DNA, 695 bp, Homo sapiens
  misc_feature (1)..(695): n=a,t,g or c
gccatttctcttggttccaggtgttctcctacatagccactctgctctacgtggtccatgcggtgttctctttaatcagatggaagtcttcataaagccgcagtagaacttgagctgaaaacccagatggtgttaactggccgccccactttccggcataactttttagaaaacagaaatgcccttgatggtggaaaaaagaaaacaaccacccccccactgcccaaaaaaaaaagccctgccctgttgctcgtgggtgctgtgtttactctcccgtgtgccttcgcgtccgggttgggagcttgctgtgtctaacctccaactgctgtgctgtctgctagggtcacctcctgtttgtgaaaggggaccttcttgttcgggggtgggaagtggccaccgtgacctgagaaggaaagaaagatcctctgctgacccctggagcagctctcgagaactacctgttggtattgtccacaagctctcccgagcgccccatcttgtgccatgttttaagtcttcatggatgttctgcatgtcatgcggactaaaactcacccaacagatctttccagaggtccatggtggaagacgataaccctgtgaaatactttataaaatgtcttaatgttcaatacatttgttgggtgttttttgggtttgggttgaattcctcagcatcaagaataccatcaatt

SEQ ID NO: 6612 - DNA, 1922 bp, Homo sapiens; identical to SEQ ID NO: 687
  misc_feature (1)..(1922): n=a,t,g or c

SEQ ID NO: 6613 - DNA, 2139 bp, Homo sapiens
  misc_feature (1)..(2139): n=a,t,g or c
ggggaggactgacaggggcctgatggaggagttggtggggctgcgtgagggcttctcaggggaccctgtgactctgcaggagctgtggggcccctgtccccacatccgccgagccatccaaggtggcctggagtggctaaagcagaaggtgttccgcctgggagaagactggtacttcctgatgaccctcggggtgctcatggccctggtcagctatgccatgaactttgccatcgggtgtgtggtccgagcacaccagtggctgtacagggagattggggacagccacctgctccggtatctttcctggactgtgtaccctgtggccctcgtctctttctcctcaggcttctcccagagcatcacgccctcctctggaggttctggaatcccggagctgaagaccatgttggcgggtgtgatcttggaggactacctggatatcaagaactttggggccaaggtggtgggcctctcctgcaccctggccaccggcagcaccctgttcctgggcaaagtgggccctttcgtgcacctgtctgtaatgatcgctgcctacctgggccgtgtgcgcaccacgaccatcggggagcctgagaacaagagcaagcaaaacgaaatgctggtggcagcggcggcagtgggcgtggccacagtctttgcagctcccttcagcggcgtcctgttcagcatcgaggtcatgtcttcccacttctctgtccgggattactggaggggcttctttgcggccacctgcggggccttcatattccggctcctggcagtcttcaacagcgagcaggagaccatcacctccctctacaagaccagtttccgggtggacgttcccttcgacctgcctgagatcttcttttttgtggcgctgggtggcatctgcggcgtcctgagctgtgcttacctcttctgtcagcgaaccttcctcagcttcatcaagaccaatcggtacagctccaaactgctggctactagcaagcctgtgtactccgctctggccaccttgcttctcgcctccatcacctacccgcctggtgtgggccacttcctagcttctcggctgtccatgaagcagcatctggactcgctgttcgacaaccactcctgggcgctgatgacccagaactccagcccaccctggcccgaggagctcgacccccagcacctttggtgggaatggtaccacccgcggttcaccatctttgggacccttgccttcttcctggttatgaagttctggatgctgattctggccaccaccatccccatgcctgccgggtacttcatgcccatctttatccttggagctgccatcgggcgcctcttgggagaggctcttgccgtcgccttccctgagggcattgtgactggaggggttaccaatcccatcatgcccggggggtatgctctggcaggggctgcagccttctcaggggctgtgacccacaccatctccacggcgctgctggcctttgagctgaccggccagatagtgcatgcactgcccgtgctgatggcggtgctggcagccaacgccattgcacagagctgccagccctccttctatgatggcaccatcattgtcaagaagctgccatacctgccacggattctgggccgcaacatcggctcccaccatgtgagggtggagcacttcatgaaccacagcatcaccacactggccaaggacacgccgctggaggaggtggtcaaggttgtgacctccacagacgtgaccgagtatcccctggtggagagcacagagtcccagatcctggtaggcatcgtgcagagggcccagctggtgcaggccctccaggctgagcctccttccagggctccaggacaccagcagtgtctccaggacatcttggccaggggctgccccacggaaccagtgaccctgacgctattctcagagaccaccttgcaccaggcacaaaacctctttaagctgttgaaccttcagtccctcttcgtgacatcgcggggcagagctgtgggctgcgtgtcctgggtggagatgaagaaagcaatttccaacctgacaaatccgccagctccaaagtgagccggcccagcaagatgaaacagggcaccccagctgacctggtactgaggccg

SEQ ID NO: 6614 - DNA, 2163 bp, Homo sapiens
  misc_feature (1)..(2163): n=a,t,g or c
cggcagccacagcaggaggactgacaggggcctgatggaggagtttgtggggctgcgtgaaggctcctcagggaaccctgtgactctgcaggagctgtggggcccctgtcccctcatccgccgaggcatccgaggtggcctggagtggctgaagcagaagctcttccgcctgggcgaggactggtacttcctgatgaccctcggggtgctcatggccctggtcagctgtgccatggacttggctgttgagagtgtggtccgagcgcaccagtggctgtacagggagattggggacagccacctgctccggtatctctcctggactgtgtaccctgtggccctcgtctctttctcttcgggcttctctcagagcatcacaccctcctctggaggttctggaatcccggaggtgaagaccatgttggcgggtgtggtcttggaggactacctggatatcaagaactttggggccaaagtggtgggcctctcctgcaccctggcctgtggcagcaccctcttcctcggcaaagtgggccctttcgtgcacctgtctgtgatgatggctgcctacctgggccgtgtgcgcaccacgaccatcggggagcctgagaacaagagcaagcaaaacgaaatgctggtggcagcggcggcagtgggcgtggccacagtctttggcgctcccttcagcggcgtcctgttcagcatcgaggtcatgtcttcccacttctctgtctgggattactggaggggcttctttgcggccacctgcggggccttcatgttccggctcctggcggtcttcaacagcgagcaggagaccatcacctccctctacaagaccagtttccgggtggacgttcccttcgacctgcctgagatcttcttttttgtggtgctggggggtctctgcggcatcctgggcagcgcttacctcttctgtcagcgaatcttctttggcttcatcaggaacaataggttcagctccaaactgctggccaccagcaagcctgtgtactccgctctggccaccttggttctcgcctccatcacctacccacccagcgccggccgcttcctagcttctcggctgtccatgaagcagcatctggactcgctgttcgacaaccactcctgggcgctgatgacccagaactccagcccaccctggcccgaggagctcgacccccagcacctgtggtgggaatggtaccacccgcggttcaccatctttgggacccttgccttcttcctggttatgaagttctggatgctgattctggccaccaccatccccatgcctgccgggtacttcatgcccatctttgtctatggagctgctatcgggcgcctctttggggagactctctcttttatcttccctgagggcatcgtggctggagggatcaccaatcccatcatgccaggggggtatgctctggcaggggctgcagccttctcaggggctgtgacccacaccatctccacggcgctgctggccttcgaggtgaccggccagatagtgcatgcactgcccgtgctgatggcggtgctggcagccaacgccattgcacagagctgccagccctccttctatgatggcaccgtcattgtcaagaagctgccatacctgccacggattctgggccgcaacatcggttcccaccgcgtgagggtggagcacttcatgaaccacagcatcaccacactggccaaggacacgccactggaggaggtggtcaaggttgtgacctccacagacgtggccgagtatcccttggtggagagcacagagtcccagatcctggtgggcatagtgcgaagggcccagctggtgcaggccctgaaggctgagcctccttcctgggctcctggacaccagcagtgtctccaggacatcttggctgcaggctgccccacagaaccagtgaccctgaagctgtccccagagacttccctgcatgaggcacacaacctctttgagctgttgaaccttcattccctctttgtgacgtcgcggggcagagctgtgggctgcgtgtcctgggtggagatgaagaaagcaatttccaacctgacaaatccgccagccccaaagtgagccggcccagcaagatgaaacagggcaccccagctgccctggtactgaggttgggctgagaccct

SEQ ID NO: 6615 - DNA, 1669 bp, Homo sapiens
  misc_feature (1)..(1669): n=a,t,g or c
gctaggcagcttcgaaccagtgcaatgacgatgccagtcaacggggcccacaaggatgctgacctgtggtcctcacatgacaagatgctggcacaacccctcaaagacagtgatgttgaggtttacaacatcattaagaaggagagtaaccggcagagggttggattggagctgattgcctcggagaatttcgccagccgagcagttttggaggccctaggctcttgcttaaataacaaatactctgaggggtacccgggccagagatactatggcgggactgagtttattgatgaactggagaccctctgtcagaagcgagccctgcaggcctataagctggacccacagtgctggggggtcaacgtccagccctactcaggctcccctgcaaactttgctgtgtacactgccctggtggaaccccatgggcgcatcatgggcctggaccttccggatgggggccacctgacccatgggttcatgacagacaagaagaaaatctctgccacgtccatcttctttgaatctatgccctacaaggtgaacccagatactggctacatcaactatgaccagctggaggagaacgcacgcctcttccacccgaagctgatcatcgcaggaaccagctgctactcccgaaacctggaatatgcccggctacggaagattgcagatgagaacggggcgtatctcatggcggacatggctcacatcagcgggctggtggcggctggcgtggtgccctccccatttgaacactgccatgtggtgaccaccaccactcacaagaccctgcgaggctgccgagctggcatgatcttctacaggaaaggagtgaaaagtgtggatcccaagactggcaaagagattctgtacaacctggagtctcttatcaattctgctgtgttccctggcctgcagggaggtccccacaaccacgccattgctggggttgctgtggcactgaagcaagctatgactctggaatttaaagtttatcaacaccaggtggtggccaactgcagggctctgtctgaggccctgacggagctgggctacaaaatagtcacaggtggttctgacaaccatttgatccttgtggatctccgttccaaaggcacagatggtggaagggctgagaaggtgctagaagcctgttctattgcctgcaacaagaacacctgtccaggtgacagaagcgctctgcggcccagtggactgcggctggggaccccagcactgacgtcccgtggacttttggaaaaagacttccaaaaagtagcccactttattcacagagggatagagctgaccctgcagatccagagcgacactggtgtcagagccaccctgaaagagttcaaggagagactggcaggggataagtaccaggcggccgtgcaggctctccgggaggaggttgagagcttcgcctctctcttccctctgcctggcctgcctgacttctaaaggagcgggcccactctggacccacctggcgccacagaggaagctgcctgccggagacccccacctgagagatggatgagctgctccaaagggaactgttgacactcgggccctttgagggggtttcttttggacttttttcatgttttcttcacaaatcaaaatttgtttaagtctcattgttagtaattct

SEQ ID NO: 6616 - DNA, 336 bp, Homo sapiens
  misc_feature (1)..(336): n=a,t,g or c
gtttcactaacaggaacaaagacagaaaccatgacagggctgccccgccaggccccgggtggggtttgtctgcacttggtgctctggccacaccagccacttttggtgacatgacccttccaagaatctttggttcaaggagcaccagttccctctcattcttgaagcagggagaaattgacctttgccttgtcgcccaggaagtggggctcggcacccataactaacacctcccacccttggaaaccatgtcttctggggtgagatgaccattctgggtctaagactgtttcaaagaagagctcatagactgactgtcagaagacagagggtaca

SEQ ID NO: 6617 - DNA, 156 bp, Homo sapiens
  misc_feature (1)..(156): n=a,t,g or c
aacgcgccgagaggaaggtggccaaggccccaatgaagctgggagcccggaagctggactgaaccgtggcggtggccttccaggctgcggagagcccgccccacagatgtatttattgtacaaaccatgtgagccggccggcccagccaggcatct

SEQ ID NO: 6618 - DNA, 366 bp, Homo sapiens
  misc_feature (1)..(366): n=a,t,g or c
caaacatcagtttgccctctatgtcctttgttgaagatgtcaccataggagaaggggagtcaatacctccggatactcagtttgtaaaaacatggcggatccagaattctgatgtcatctgggtgattctcagtgtggaggtgggtggacttttaggagtaacgcagcagctgtcatcttttgaaacggagttcaacacacagccgcatcgtaaggtagaaggaaacttcaacccttttgcctctccccaaaagaaccgacaatcagatgaaaacaacttaaaagaccctgggggctccgagttcgactcgatcagcaaaaacacatgggctcctgctcctgacacatgggctcctgctcctgacc

SEQ ID NO: 6619 - DNA, 291 bp, Homo sapiens
  misc_feature (1)..(291): n=a,t,g or c
gatttaagatttggggggttaaaaaagaaaacttaactttataaaattatttatnctatttnaagccttctatcatatttccccatccaattgtttggtttcagtggtccagctttatttacaggcatataaaatgaaattgtgagatgttttgcaagcttctttttactttgagtagcttttaatttgtatgtttttatgtggatgaagagcatttttaatgcttttgtgcaataggntccaatatgcatttattagacatctgtttaaatggtaatgtagcatttattt

SEQ ID NO: 6620 - DNA, 485 bp, Homo sapiens
  misc_feature (1)..(485): n=a,t,g or c
gaaatggatgagatgatggcggccatggtgctgacgtccctgtcctgcagccctgttgtacagagtcctcccgggaccgaggccaacttctctgcttcccgtgcggcctgcgacccatggaaggagagtggtgacatctcggacagcggcacagcactaccagcggtcactggagtgggagcagtggtgtctccaccccctcgtccccccacccccaggccagccccaagtatttgggggatgcttttggttctccccaaactgatcatggctttgagaccgatcctgaccctttcctgctggacgaaccagctccacgaaaaagaaagaactctgtgaaggtgatgtacaagtgcctgtggccaaactgtggcaaagttctgcgctccattgtgggcatcaaacgacacgtcaaagccctccatctgggggacacagtggactctgatcagttcaagcgggaggaggattctactacacagagg

SEQ ID NO: 6621 - DNA, 448 bp, Homo sapiens
  misc_feature (1)..(448): n=a,t,g or c
caaagtggtcatcaggactctcagcacattcaagaacacggagattagtttccagctgggagaagagtttgatgaaaccactgcagatgatagaaactgtaagtctgttgttagcctggatggagacaaacttgttcacatacagaaatgggatggcaaagaaacaaattttgtaagagaaattaaggatggcaaaatggttatgacccttacttttggtgatgtggttgctgttcgccactatgagaaggcataaaaatgttcctgggtcggggcttggaagagctcttcagtttttctgtttcctcaagtctcagtggctatcctattacaacatgggctgatccattaattaggaaggttattccttggtgtgggaggtgggaaaatgggtggattttaaaaacttgtttactccaaggcaacttgcccaattttaatncggaaa

SEQ ID NO: 6622 - DNA, 926 bp, Homo sapiens
  misc_feature (1)..(926): n=a,t,g or c
ccagagaggggcaggcttgtcccctgacaggttgaagcaagtagacgcccaggagccccgggagggggctgcagtttccttccttccttctcggcagcgctccgcgcccccatcgcccctcctgcgctagcggaggtgatcgccgcggcgatgccggaggagggttcgggctgctcggtgcggcgcaggccctatgggtgcgtcctgcgggctgctttggtcccattggtcgcgggcttggtgatctgcctcgtggtgtgcatccagcgcttcgcacaggctcagcagcagctgccgctcgagtcacttgggtgggacgtagctgagctgcagctgaatcacacaggacctcagcaggaccccaggctatactggcaggggggcccagcactgggccgctccttcctgcatggaccagagctggacaaggggcagctacgtatccatcgtgatggcatctacatggtacacatccaggtgacgctggccatctgctcctccacgacggcctccaggcaccaccccaccaccctggccgtgggaatctgctctcccgcctcccgtagcatcagcctgctgcgtctcagcttccaccaaggttgtaccattgtctcccagcgcctgacgcccctggcccgaggggacacactctgcaccaacctcactgggacacttttgccttcccgaaacactgatgagaccttctttggagtgcagtgggtgcgcccctgaccactgctgctgattagggttttttaaattttattttattttatttaagttcaagagaaaaagtgtacacacaggggccacccggggttggggtgggagtgtggtggggggtagtttgtggcaggacaagagaaggcattgagctttttctttcattttcctattaaaaaatacaaaaatcaaaacaaaaaaaa

SEQ ID NO: 6623 - DNA, 1522 bp, Homo sapiens; identical to SEQ ID NO: 1079
  misc_feature (1)..(1522): n=a,t,g or c

SEQ ID NO: 6624 - DNA, 473 bp, Homo sapiens
  misc_feature (1)..(473): n=a,t,g or c
atttctgaatctagcaaatcctccttttacccgttgaatgttttgacnngccctgactctaccagcgcccataaatgatctctagaaggactgttagtaccaatctgtttttcaactttgaagctaaaaaccctgatatggtaatattatggtgcatagcagaggtctcggaaaaaaaatatttctgttcactttactttcaggttaaaaatgtttctaacacgcttgcaacttcccttatggcattaatcttgttgagggagagagacagaatcctggactctccaaagtatttaactgaaagtagggcctgctctgacagggcccatgtcccacaaggctgcttggccctcagtgggtgcttggctgtnctggatgatatgtttgatcngtattggataagggaccaatgacagcnaaagcaaaaattggctttaaagctntggtgttactttttctnaagttgtntaaat

SEQ ID NO: 6625 - DNA, 366 bp, Homo sapiens
  misc_feature (1)..(366): n=a,t,g or c
agcaatagaagcctcgcccccgcccttccctttcgcaggattcgccgagtctgtagcctccccgatccaagttcctagacctcatggctgtcccctcccaccagtcacctccactgcacaactcgggcgggggtgtgacacctctcccccacccccgactccgtggtttccgtatcgtcaacccttcagccgccgacccgggaggtctggcctacactggtcttccccttcccatcaactctttctgcttgacaatgtagcaacccagggccccccacccacggtcctcccctttttcctctccctgacaataaagtctgaatttgttctgccaaaaaaaaaaaaaaaaaaaaaataaaaaataat

SEQ ID NO: 6626 - DNA, 1666 bp, Homo sapiens
  misc_feature (1)..(1666): n=a,t,g or c
atttgctttctctttttcctttcttccggatgagaggctaagccataatagaaagaatggagaattattgattgaccgtctttattctgtgggctctgattctccaatgggaataccaagggatggttttccatactggaacccaaaggtaaagacactcaaggacagacatttttggcagagcatagatgaaaatggcaagttccctggctttccttctgctcaactttcatgtctccctcctcttggtccagctgctcactccttgctcagctcagttttctgtgcttggaccctctgggcccatcctggccatggtgggtgaagacgctgatctgccctgtcacctgttcccgaccatgagtgcagagaccatggagctgaagtgggtaagttccagcctaaggcaggtggtgaacgtgtatgcagatggaaaggaagtggaagacaggcagagtgcaccgtatcgagggagaacttcgattctgcgggatggcatcactgcagggaaggctgctctccgaatacacaacgtcacagcctctgacagtggaaagtacttgtgttatttccaagatggtgacttctatgaaaaagccctggtggagctgaaggttgcagcactgggttctaatcttcacgtcgaagtgaagggttatgaggatggagggatccatctggagtgcaggtccaccggctggtacccccaaccccaaatacagtggagcaacgccaagggagagaacatcccagctgtggaagcacctgtggttgcagatggagtgggcctatatgaagtagcagcatctgtgatcatgagaggcggctccggggagggtgtatcctgcatcatcagaaattccctcctcggcctggaaaagacagccagcatttccatcgcagaccccttcttcaggagcgcccagccctggatcgcagccctggcagggaccctgcctatcttgctgctgcttctcgccggagccagttacttcttgtggagacaacagaaggaaataactgctctgtccagtgagatagaaagtgagcaagagatgaaagaaatgggatatgctgcaacagagcgggaaataagcctaagagagagcctccaggaggaactcaagaggaaaaaatccagtacttgactcgtggagaggagtcttcgtccgataccaataagtcagcctgatgctctaatggaaaaatggccctcttcaagcctggtgaggaaatgcttcagatgaggctccaccttgttaaataaattggatgtatggaaaaatagactgcagaaaaggggaactcatttagctcacgagtggtcgagtgaagattgaaaattaacctctgagggccagcacagcagctcatgcctgtaatcctagcactttggaaggctgaggagggcggatcacaaggtcaggagatcaagaccatcctggctaacacggtgaaaccccgtctctactaaaaatacaaaaaataaaaaattagccgggcatggtgacgggcacctgtagtcccagctactcgggaggctgaggcaggagaatggcatgaacccggaaggcagagcttgcagtgagccgagatcacgccactgcactccagcctgggagacagagcgagactctgtctcaagaaaaaaaaaaaaaaaaaaaaa

SEQ ID NO: 6627 - DNA, 485 bp, Homo sapiens
  misc_feature (1)..(485): n=a,t,g or c
tctgaggactcagctggaaccaacgggcacagttggcaacaccatcatgacatcacaacctgttcccaatgagaccatcatagtgctcccatcaaatgtcataaacttctcccaagcagagaaacccgaacccaccaaccaggggcaggatagcctgaagaaacatctacacgcagaaatcaaagttattgggactatccagatcttgtgtggcatgatggtattgagcttggggatcattttggcatctgcttccttctctccaaattttacccaagtgacttctacactgttgaactctgcttacccattcataggaccctttttttttatcatctctnggctctctatcaatcgccacagagaaaaggttgaccaagcttttggtgcatagcagcctggttggaagcattctggagtgctctgtctggccctgggtggggtttcattatcctggtctggtcaaacagggcaccttaaatcct

SEQ ID NO: 6628 - DNA, 1284 bp, Homo sapiens
  misc_feature (1)..(1284): n=a,t,g or c
cagcgggtcggggaccgaaagtcgcttcggggcgggcgccagtctccggcccagccccgggccggcatccaggcgccgccgctccggcccagccccggcccggcccctatgatgaagagggcgtccactggagttcttgctgtcgacatctttgacaagttcaacttcacgggagccagagtcccatggttcgacgccattcatgaagcattccccagggagctggagtcctccatctccttcccagccaacttcttcaaaccacctgaagaaaaagaaggccccctggtaaggccagccagccggaggaccaccccgcagaccacacgcccagggcctggcaccgagggggaggccccgatcagcaggtgaaagcgacaccctgatgacactggctagttcaccttcactctggtcatcgtttactgtaccccggggcagctcccgcctgagccctatgaccccaaccgccgcagcctctggctgcctcactggcccatcattaatacgtcgatggtgagcgcactggtgtacagcgagggggctccacttccgagacccctggagaggcccgtcctggtggagttcaccctgctggagatggagaagcgaaccaagcctgtctgtgtgttctggaaccattccctggcgtaaatgtgatgccgggagttctgcatcttcataccaagagcagtgatgaccttttagctggaatggccagaggggtaacggtgactaatggtgttaaagggaaggaaagctcctgcccatctgcagcaccttcggcatctgcccctgccatgaccactgtggagaacaaatccaagattagcacagggcaccaactggacagaggcctccggtcagcctcactctgactgcaaccccctctcactggacagcatcacctggacacagagcctcacctagtctgtgtcccatggaccacaactttgctttggacagtgacaccaagaatactcacccctttacttagccagaccacaggcagccacctggacacaaacatctctccagagtcagcctccacacagactccacagcagaactcccagggaggcactggggcatggcttcagagcaccaggcaggctccgcgtgcctagcacccgctcagccagggcagcctgcagcggagcttggagccagcagcttctcatctcttggcctcgggaaatgtagctggagtcatcatttagcagagcacggtgtccctgggttggccacccagcttagttttaaaataaaataatgtaatcttgg

SEQ ID NO: 6629 - DNA, 1284 bp, Homo sapiens; identical to SEQ ID NO: 6628
  misc_feature (1)..(1284): n=a,t,g or c

SEQ ID NO: 6630 - DNA, 275 bp, Homo sapiens
  misc_feature (1)..(275): n=a,t,g or c
ttgcacttctgcaaagatgtttaatgcacttagattacagagaggaagagggggcaagaaggaaacgacatctaagtgagtcacccaaaaattcttacaaaagtcccaggctggctgcagcccaggaaccgagtcgccactgacattaaaaactaatataaaattttacaaaaatctgcttgtcgcagcattcaggtacttgtacaaaaggaggggtctccctacagggctcctgacttgtaacaagggacccaaggcacctcacctgggcatgg

SEQ ID NO: 6631 - DNA, 430 bp, Homo sapiens
  misc_feature (1)..(430): n=a,t,g or c
tatgtgcagaaagagactcatccgctgaatacacagcactgttaatcctacagtcttctgtccccacagagtctgctagatcttcctcttctgagtcatcctcttcttcctcctctggtgctgacgaactggaggtgggccctttgcaggttttcaggtggcgggtgagatggtatttggttagataagcctttgtacatttttcacagacataatcccgttttccttcatgagaattgagatgcttctttaagtgatttgttctcaagaacangcttatcacacttgggacacttgatctggcgttcttgagttgtggatgagcacgtgctgcttgaggtcctgcctccgcataaacaacttgtcacagtaatcacacttaagattcttctccccagtgtggataaccatgtgggactccaggtgagcc

SEQ ID NO: 6632 - DNA, 429 bp, Homo sapiens
  misc_feature (1)..(429): n=a,t,g or c
ttaggttttgttatcaaggttgtactggcctcaaaaactgaattggaaaagttccatcttttttcttctagaaaagtttataaaagcctggtattatttcttaaatatttggaataacttcagtgaagccatctgttcctagagttttctttctaagcaagtttttgaatactccactcaggtattgtttgcagttgtgacaaggcacaaccaatctctagtatgaccttgtttccagggcttttactgatggcatgttcaccaacccactggcacttcctaagttctaatcatttctcctttgtactgcaaaatgcaaaacaaaacaaaaatcctacttattatcttctcaaattagcttttcaggctcctgcccctatgcagcatgaggacatctgggaaatttcttggaggaattatatgtgtttg

SEQ ID NO: 6633 - DNA, 326 bp, Homo sapiens
cttgcagctccagctcaaaggaaaacaaaaactgggtttgaatcctcgctctaccactaggctgcgtgactagcactaggctgcgtgactaggggaatgtcacttagcacctaggagccttggtttcatcacattgcaagggtggtgtgagaatcaagtgataaaatgttaagtgccaaccaggcacaatgtctgggtgcaaatggttgcatgacaatagaggtttctttacattatgatgactactcagccttttaagtgacaaagcatcttttaggtggagaccatgtatttctagtgatcaattcaaattagtacgactttcc

SEQ ID NO: 6634 - DNA, 376 bp, Homo sapiens; identical to SEQ ID NO: 900
  misc_feature (1)..(376): n=a,t,g or c

SEQ ID NO: 6635 - DNA, 292 bp, Homo sapiens
  misc_feature (1)..(292): n=a,t,g or c
aggttcaactcaaatgagtttatttattaggaacttttgaaacactgaggttgaacagagaatgggaactagacagatcatttcagcatagatggttactttccctcttgctacagactctgcaggaaatgtcaattactgctttctttctccattatgttcaatcctttccaaggcagtcagagagctctctcccttcccattaagagaggatcttctccggtagcctttgaactgggaagtggctttagtatttgcaagtgtagatatacaaaagctcttcctcctctta

SEQ ID NO: 6636 - DNA, 198 bp, Homo sapiens
  misc_feature (1)..(198): n=a,t,g or c
ttttttttttttttttttttttttctagaatccgctttattatggcacctggtgggtctggtgggatctgagggaggaagaggctgcagtcttgctgggcagcccctcggtcagtccagcagcccctcaggccatgctgctgctcagctgcatggcaaagtcctgcacatgctccttcagagtctggcgggcatctgc

SEQ ID NO: 6637 - DNA, 418 bp, Homo sapiens; identical to SEQ ID NO: 381
  misc_feature (1)..(418): n=a,t,g or c

SEQ ID NO: 6638 - DNA, 435 bp, Homo sapiens
  misc_feature (1)..(435): n=a,t,g or c
tttttttctctggtataatgtttatttaaatagtaatcttaaaaaggctttatacaaatcatataaacacagtttgacattgttgtttattttttacattgaagaatcacagtaaaagctctcaagttcccgtgatctggctcagcagtgaatggtcgaatacctctaactgcaaaccctgaaaaagttaacctgctatgtgacaggttaactctttcccttgttttcttgtcattcatgcttattccttggaccctcatccctgtcaactcccctgccccaccaaagacagaaagcaaccctgtggccctgttgaccacctagtccgggagagtgtggaggtaatgtgtcattcagtacaaggcaaaaaggagatcaatactggcagtggggtttcccaaagggaatgactcaaggagatgggtcagctagcct

SEQ ID NO: 6639 - DNA, 569 bp, Homo sapiens
  misc_feature (1)..(569): n=a,t,g or c
ttttttgcaagatttaattcttcctttaatataaataaggcagcatgaaacaccaagagccccactgctttctgctttagaagcagctttggtgcagaaaagattcccgtttccccaccgagttctgttgtctctgtacacacaagaagccagaagatatttttttttcagtgaactttctcctggaagcaaaggagaagctatgggagatccaggcatggttttggcttctggaggctgttttttggttactggggtctcttcaaagcaaaacgggatcaggatgaagagggggaaaggcatgggccataaataaataaggaaatttgccccgattctacaaatgcatctgatggaatgaggagggtcaggctgtgagggattgggggtagctccaggctgctgttagggacacacttgagctggttcattccctggagtgccccgcaactgcgtctagggagaggcaggcccaagcacatgttcagtctaattccagctcacactggaaggcttcctataggtttggttgccctgatcacagccgagctgccccaccaggaattaac

SEQ ID NO: 6640 - DNA, 257 bp, Homo sapiens
  misc_feature (1)..(257): n=a,t,g or c
tttattttggaaaatgttaaaatttattaataatagttaacatcacatagttaattaaactagttatgtattgtacataatgacaacatcttcactagactgagtgctcaaggatttgagatgattcgctattcatcacaccccgaagattgagatccactgtatttacacaaagcaaagccatgtcagcaagggactgtcaacctgattctgagaacataaacattcaaaatttattttccagtgttcctttttgg

SEQ ID NO: 6641 - DNA, 272 bp, Homo sapiens
  misc_feature (1)..(272): n=a,t,g or c
ttttactggttcaaacatttgcttttattgcgttatatacattctgcagctgtagaatcagaatctgggggaagccaactgagaccccgaagcccagcaggagtccatctgaggtacagaacctgtgcttctgccatgttcctggggcaggggcattccatttccccctgatgctttttcttcctgaagagaagtccaacagactgccagcccaggtctgaaatgcaaggtgggactcctgaacacagtcggggggatggggcagaggcaaa

SEQ ID NO: 6642 - DNA, 451 bp, Homo sapiens; identical to SEQ ID NO: 2125
  misc_feature (1)..(451): n=a,t,g or c

SEQ ID NO: 6643 - DNA, 416 bp, Homo sapiens
  misc_feature (1)..(416): n=a,t,g or c
tagtactcaaacaactttatttcactagccatgagcaaaaagttgaccggctcctggggattttccatcctgccctctccctgctggtggctcccatgatttggaaataacctcatgttccacttggcagtgcctggctttgtgcacccacatggttttggcctgggtcccagtgaaaatggtcctcacctggctggggaacatggttctgagaggccccttgatctgccctggggacatgtgtggccatgctaagggccctgccgaacttcacgtgactggccacctctgccagggtgcaggcagctcctagcatggagacatccttcatggaagtgagctttcccacccacctccatacccacatttctcagaaacagagttaacagggaaccaagagtcaagaagccacaggg

SEQ ID NO: 6644 - DNA, 367 bp, Homo sapiens
  misc_feature (1)..(367): n=a,t,g or c
ctgaggttgcttttattccaagacctctgtgagctccgcccagataccattggcgcctgcttgtgtccccaggggacctacacacaacagcaccagcaccatgagggcgctctcgacccacacaagccctggtccccgtcagtcaatgtgactgagtccgccattgaggccagtctggctggccccaagtggtccctctgagtccccaactccctggccagcaaggagtgaagctccatgccccttggtccacgcctctagagtctgagcatatcctgcagcctcgatctcaggaggcaacgcatgcagcccccctgcactcagaaagggggcttctccagtcgtggtcttcttctctgtccacaag

SEQ ID NO: 6645 - DNA, 410 bp, Homo sapiens
  misc_feature (1)..(410): n=a,t,g or c
agaatctcgcactgttgcccaggctggaatgcagtagcgtgatcttggctcaccacagcctctgcctactgggttcgagcgattctcctgcctcattgggcactgaatttgtggatattcattatattattagtataagtaaaataaaaataagcaaaacagggtcatgcttggatcaatgaggatactatgttatgagccaaggaaaaactgaggagccagagacctcaagaagccaaacatacaatgtataaacaacaaaacagagtaagaagctattttaaaatacagtaaaacaaaagaggattggtttctcaaatgtaaaaccacacgctttctgagggccttgaccctaaggacactagtagttacagaaagctttccctttctacccctaggagtttcaatgg

SEQ ID NO: 6646 - DNA, 352 bp, Homo sapiens
  misc_feature (1)..(352): n=a,t,g or c
ttttttttctgcctataaagtgaatgacttgtggtgcaatcttacaaagtctcaatctgtgtattctgcaataaaggcattatattatcactattgcatttgtgatacattctaccttaccctttatgtgacaattctatactgttttaactgtcaaattgtaagtaaaagtgtgaattcgtgaccaaaaattttccacaccagcaacttaagganctacagcaatatgtttaggaaaactgcgatcccaaacaaaaaatctatactagggtgaggacagggatgacattgactttaattccaataggacttcactaccacatgacgtccattactagtggctcacttttcc

SEQ ID NO: 6647 - DNA, 397 bp, Homo sapiens
  misc_feature (1)..(397): n=a,t,g or c
ggagactggatatcatctttaattaataatgccacagcccaatgtcttttttgttgctgtagcaaattgtgattgtgtgtgcgtgtgtgagtgtgtgtgtgtgtgtgttcctgaacagatgaagggccagcagagactcccaagcaggtctcagccaacaactctgttgagcagcaactggaagatagtctccatagaggcacagaggccagacttctgcctcctatggcattgatcctctctcctgggccacctttcgtgcattgagggcaaggctgaggcctgtaccagcccagattaaaggacttctaagcacaggtcagcctccagttcccagtactcactggcctctgaccagagggatgccctgggtagagtatagacttccaggcagagg

SEQ ID NO: 6648 - DNA, 329 bp, Homo sapiens; identical to SEQ ID NO: 2247
  misc_feature (1)..(329): n=a,t,g or c

SEQ ID NO: 6649 - DNA, 187 bp, Homo sapiens; identical to SEQ ID NO: 3038
  misc_feature (1)..(187): n=a,t,g or c

SEQ ID NO: 6650 - DNA, 522 bp, Homo sapiens
  misc_feature (1)..(522): n=a,t,g or c
ttttcaatataacatgtctattttattttaaaaaacaaaacccaaaccacctgaccccttccccaggaggctcttgacgaaactctagggaagggcctggctccagccaagcaggggacagtcagaagatgtcaacatggatgccaggctggtgggctccgcattctccaagccccccatccaccccctttgctcctcggtgctacaggcactgccgggtttgaggggacaggcagggcaggactgtgggcatgcagagcctcctggcagccagggagggctcgcgcccccctgcatctggcgaggcaggcagctgtgtgcgcagtgatggagctaggaggaggaaacatgcgcagacaccccgtgttcccgcttccccacgtggccaggagagtgttcaaacacgaacaaggatggctgggcactcagggcccagcctccaacccaggagaggaagaggggggtccgccctcctggttcttttgttcgtccttagatggatggtgttctcggtgccactcg

SEQ ID NO: 6651 - DNA, 198 bp, Homo sapiens
  misc_feature (1)..(198): n=a,t,g or c
tttttttttttttttttttttttttttttctcattgtaacactcgtttttatataaatattcgcaagtcatgttacagaagaagccccaccagggaaaaaagtcaacgttagggttttgttagattgacccctgccttctaggttgggccccagctggagcgcctgctgctttgggaaggctggggttgctgccgtga

SEQ ID NO: 6652 - DNA, 323 bp, Homo sapiens
  misc_feature (1)..(323): n=a,t,g or c
ttttttttttttttggactcgcagactttaagcaaacacgtgtggggccgctcccgcctggcgttcaagttgtccgcgtcggtcaccagcggggccaggtagtccgagtgccggatcccgaaactccagccgcggggcttccggtgctgatccacgttgtaggccgcgggccctggcttccgagtgttgtcttgggggagcgaagtccgcgccagaatcgtgaactggggggcccgggacttgtagacccctggactcacgacctgataggcgcaggggcccggggtcttgctgaggtcctcgaagaaactgccagccgctct

SEQ ID NO: 6653 - DNA, 392 bp, Homo sapiens
  misc_feature (1)..(392): n=a,t,g or c
tttttttttttttttttttttttttttttaaatttggagaggagactttatttcttataaagggttaaaggcctgcaaggtggccatcccacaggccaggaagtacaatctctggcaaagaccagagacaggcacttcaaaggaggagcaggggtaggaacttgatgctgaataggttggctaaacatacatattcaacaggttacaggaggagctatgaataattatgaaggtcatcctgactcatgcttattgaacaaacatgcatgtaacatacaacccatgttcactttgaggtagagacttaactctttttgtagttgttattgtttgttttttgtttttcgcgacggagtcttactctgtcacccagactggagtgcagtggcgcc

SEQ ID NO: 6654 - DNA, 414 bp, Homo sapiens
tttctgttttttttcctgtttgatagctgtcagttatagtgattggtatttaatacaaaaaaaaccaaagatatgaaaattgttctatattttaatctgcaaattgctccattaggcagatttaattatttgtggatttacttatggtgcttccagatatcttgtacctcttaatgtgaccatcagaaaacttgactgagaaacatttgtactatacaaaatacaaaatgctttcagtatattattgcaagtgcttcttaaaaacatatagtattgttaaatgtgtactttttaatgttgtcttgtttaaattggaaaattaaccaaatgttatccatttaaacatgctttataacatattaaatgtgagtgcttaataagtacttttaatgatactggtacgggtgttggaac

SEQ ID NO: 6655 - DNA, 385 bp, Homo sapiens; identical to SEQ ID NO: 5944
  misc_feature (1)..(385): n=a,t,g or c

SEQ ID NO: 6656 - DNA, 454 bp, Homo sapiens
  misc_feature (1)..(454): n=a,t,g or c
tctgaatacttgcttatttattcttatacaattaatgatcccctcttaagaactaccattgcagtggctgctcccacagagccccctccaggcccttcccccaccaccctgggtatccctagcacctgtaggacagcatcgttgaaacattaggggtgctggggtctgagagggtatcctgctgggacaatgcccgcggaacctcctgcctgtctttagacatggacaaggaagatgcactgatctgttttgaggagcacatccgagctttggagagggaagaggaggaggaacgggagcgggcccggcttcgggaagcgacgccaacaacgcaagaatcgggaggccttccaggtatctttgctgtcctttctaagatcagagctcaagtctgccctaagagcacaanctcttcaaccattccctggccccttctggatanggtggcttgttt

SEQ ID NO: 6657 - DNA, 449 bp, Homo sapiens; identical to SEQ ID NO: 3927
  misc_feature (1)..(449): n=a,t,g or c

SEQ ID NO: 6658 - DNA, 447 bp, Homo sapiens
  misc_feature (1)..(447): n=a,t,g or c
gccataaggggcataattgagaaaactggcagaatgtgagtaaggtgaaagcactgatttcataaacttgatggttacgctgtgattatctaagagagtgtccttgtcttagaaaatgtatgctcagttatttaggggtaatgggagatcatgtctacagctactgttaattggttccagaaaaacagactgtggtgtgtgtgtgtgtagaaagagaaagagaaagagagaagggtagcagagggggagagagaaaggtcctgataaagcaaaccgtaaaaattttaacaaatacaaagtaaatgaaatgtatttggaaattagtattatttgtattaagtttgaatgattttatatttgtgtaagtttgtattattcntgcaacttttcngtaagtttgnaattatttccaagttttcccaaattaaatggacnaatataaagggg

SEQ ID NO: 6659 - DNA, 145 bp, Homo sapiens
  misc_feature (1)..(145): n=a,t,g or c
taacagcttttatagttagcagccattctttattttctggatagccaggttttatcacgcttctagtcaggatgcctcctattccttctaaaaattacggtctgactagtgagcaaagtcttgaatttattcaaaagctcctaaa

SEQ ID NO: 6660 - DNA, 270 bp, Homo sapiens
  misc_feature (1)..(270): n=a,t,g or c
cttcctcattcattagncaagattacagactaggatatagcaacctattattcaagaacagcttttaaaggtagctgcttcagactggcacttcgggaaaactttgaaagtagacttctttttttttttaatgcttattttaactatagattggtgataacgattcaaccccagagatccagctaactgttggcacagaaatccttaacgctactctcaagcaaataagatcttgtaaggggaaactcctgcaaaatataccttgtgaac

SEQ ID NO: 6661 - DNA, 370 bp, Homo sapiens
  misc_feature (1)..(370): n=a,t,g or c
catctttcagtgcactttaatcgaaattccatcatcagaagagttctcgtagcatacaatgtcaggatgggcatgtcgacttggtcctacaaatggaatatccacagatttgcacttcaaacatgtatgaaaaataaaatatataatatttagctttataaatttccccacttagtcactttatctttaaaataaattactactcccgtccaatacagtgagtagcttggagtcactcagacaatctctagccaaatgatctctgttttcttgaggagttctgtagggaaatacttgatgaagacagtccagtgcttacaagaatcaacatgaatttaaaacgagcacactcttcacagtggggcggaac

SEQ ID NO: 6662 - DNA, 496 bp, Homo sapiens; identical to SEQ ID NO: 9
  misc_feature (1)..(496): n=a,t,g or c

SEQ ID NO: 6663 - DNA, 394 bp, Homo sapiens
  misc_feature (1)..(394): n=a,t,g or c
tttttactgtgtcccaagcttctttatttaagaaaaaagtgatacatgatgtgggattaaaatcaagagcatcattgaacttcaccttccctccaaccagttgccccaaactcccctgcccccaccctttgtgttcccaattccttccttagtgaatgaagaacttaatcccaaaaaccctggcacaaactccaggttttctttccctagctcctcccctccccctgtcccccattcctagaagggcaggcacctcagtttgaatgcatgggagagcccagagtggtgacagagacagggggaaaggcttccccctcagggaaagggaccgaggagtacagtggcagtngaagtgagggctcccatagcctggggtaccaaaatggggccctgg

SEQ ID NO: 6664 - DNA, 210 bp, Homo sapiens; identical to SEQ ID NO: 2677
  misc_feature (1)..(210): n=a,t,g or c

SEQ ID NO: 6665 - DNA, 493 bp, Homo sapiens
  misc_feature (1)..(493): n=a,t,g or c
tttttttttttttttcccgtggcactcaatcttttattttcttaaactgtacacaaacgtacaatactttaacagcaagtctatgggaaaattgtttggttttaaattattatgaaacagaatctatggggagctttattaaataaacataaagatgaggatttaaggatacacacctgcattctatcatagtcatttttactctaccttctgggtgtgtaaggatggaaaagacacatcaaaccgaataaacaaaatccattcataccctgaaacgttggcaggccactcaagggactgctcagaacgtccacctcatctcagatggcctcaccgtctaataaaattaaaactgatctgttggcctctttggttccaaaattatgtataatacatttaactgtattctcttttttttttttttgctgctataaaataactttttttcaatggcagttctgactaatctgcacttaatcagtgcaacataaaa

SEQ ID NO: 6666 - DNA, 282 bp, Homo sapiens
  misc_feature (1)..(282): n=a,t,g or c
tttaacaaaacacttttatttggtccactggagcctgagtcggaaaccactgtggagaatcctatcataaaggaatggggactgacagttgataaaacagcttctgtgtcacaagagctggccgtatttacatatttaggggttaaaaatattcacagttcagggtacagggaggccaaaggggagtggggaatgtttctccaggtgtaaaagctctggaagcccctaggagggtacgggtggtggtggtggtggggggggtggttgggaggggagtgaagg

SEQ ID NO: 6667 - DNA, 411 bp, Homo sapiens
  misc_feature (1)..(411): n=a,t,g or c
tttaagaaaattcagtaattctccattgaacatctactacatatccaactctgtgctaaggtatgctgtggaaaagtcaaggaagaatgtatgagacacatccctgcactcccaggagtttataatttcggaggagatgcaaacgtggacccattttaatgtaacaaaagatacactgtgttaacagccaaaatggaggcctgtacagagtactggggcaacctggaaatctggttttaggatacactgcattcaaagcaatttgcttttttcttcaacatttcttgagcacctgttatgtgcaaagcaaggagtcaggtgcctttctggaaaacgaaataaacacggcactgtctctgtttacaactgcccatttaacaaacatttcttgaacatctactacatgtgatg

SEQ ID NO: 6668 - DNA, 394 bp, Homo sapiens
  misc_feature (1)..(394): n=a,t,g or c
gctatgagtcatttatttgagatcatttatcaaaaggcacttaccgagtaccaatttttgaggcaatgtaataatgttattttatttttacatgagctagttcttatacaaccatcaattctgaatcttgtttagtttgatgttaagtaatatacacaatttatattgttcatgtatgaaatttgtctatttttccatagctttttctgatttcctcattaggatttcaaatatcttttggaaaatactcaaagccaaaaggtggtcagaatttcacattctaaattgactttttattttatttttttttttgacagagtctcactctgtcacccaggctggagtgtaatggcacgaactcagctcacttcaatctccgcctccagggttcaag

SEQ ID NO: 6669 - DNA, 452 bp, Homo sapiens
  misc_feature (1)..(452): n=a,t,g or c
ttttttttagatagatagatagatagataggatagactctcactccttcacccaagctagagtgaaatggcatgatcttggctcaccgcagcctcctggtttcaagaggttctcttgcctcagcctcccaagtaactgggattacaggnacccaccaccacccccagctagtttttgtatttttagtagagatgaggtctcgaactcctgacctcaagtgatccacccgcctaggcctcccaaaatgttgggattacaggcgtgaggcaccgcanccaacctaacagaggaaacacttcaaatgcacatcctcacatttctagtctacgtagctgggaaaaaaaggacatttttaatatgctaatgtgggaggtcacctagttaccctaagggagaaangcaaggcaaggncccactgncacagcaagtttccccttgggaaggcccanggg

SEQ ID NO: 6670 - DNA, 406 bp, Homo sapiens
  misc_feature (1)..(406): n=a,t,g or c
ttggtacgtacacacccacactcacacccacccacacacacccatacacccattcctgatgcactgagcaaatacagtactgagaagggacctgatgagatacaggaggctggtgtggagggctcgggtcactggtgactcgccaaaaaaaaaatatattgactatgaggcaagggatacaccaagacaacagccttccatcactgtttgcacagagttctcttcttaacacctccctgcaacacttctcaagggtgctcttgaatgggacccagctatccggggaacagctgctgcctttacggacatggggccaacagtgggcagggagtttntaggaagggggagagggcttggggactttaggtttttcccctttacaggccaggcccctttnagggggcac

SEQ ID NO: 6671 - DNA, 508 bp, Homo sapiens; identical to SEQ ID NO: 4129
  misc_feature (1)..(508): n=a,t,g or c

SEQ ID NO: 6672 - DNA, 456 bp, Homo sapiens
  misc_feature (1)..(456): n=a,t,g or c
cagccaagagttctctttattccctttgatcctcccccaaggtgagggcttaggcagctgtagaaccccaggaaagaacggaatccaggcaatctgtttagagaccccccactccaaatttatccttttcctttccttcccctaagatgtttccagggccctctggtgcccacactgtcctcttccttccanttgggggtggggaaatccttcctgcgaggtcagggcatttntntacaaagtggcctgaatgaggccagggcctgagaaggagccaccagntgggaggaaaggggntccaagncttgcttttaacacccctggcaaaacccccaccctnccaagatttttcacaaaagggtnaggaaattcagggtacggnaaccattcaatgggncaactttggaaaatngcatttttcctcagggnctttggcagtttccccggaggtttttt

SEQ ID NO: 6673 - DNA, 316 bp, Homo sapiens
  misc_feature (1)..(316): n=a,t,g or c
anctttcagtgcactttaatcgaaattccatcatcagaagagttctcgtagcatacaatgtcaggatgggcatgtcgacttggtcctacaaatggaatatccacagatttgcacttcaaacatgtatgaaaaataaaatatataatatttagctttataaatttccccacttagtcactttatctttaaaataaattactactcccgtccaatacagtgagtagcttggagtcactcaggcaatctntngncaaatgatctctgntttcttgaggngntctgtagggnaatacttgatgaaggcagtcccgtgctt

SEQ ID NO: 6674 - DNA, 435 bp, Homo sapiens
  misc_feature (1)..(435): n=a,t,g or c
tttttttttttgaaaggttaaaaataacattcttttaataagtttaaacttttagagaaaagagaaatatactgagaaagacccatataactgcttcaacaaagaaaacaacttcttcattatcttcatactttacttcatattacaaattttgtgctactgttagatgatatattaattttattttcattacataaattgaggaagaaatgcagaatcagattcaaatatattacaaggcatttaagggaggtgtgtcctgttgctgaacagtaaattatctgaaaatctacttttttnttttttggagatggtctcattctgtcacacagctggagtgcagtgtcgtgatctcggctcactgcagcctccacctcctgggttcaagcaattctcatgccttagcctcccaagtagctgaggcaagagaaacac

SEQ ID NO: 6675 - DNA, 439 bp, Homo sapiens
  misc_feature (1)..(439): n=a,t,g or c
gttaaatgaaattgtattttgcccacggtcgcttctgtttgatccctggggacagaggggagcaagggaggggagtggcagggggaggcccaggtgtggggctggagggggtactggcggcacgggaggcagtaggcttgggcaggggaggagtgcgctgcgcctcaggaggcaaaggtgccccagcctgggcaggccctggaccagcccaagctgagcagcgccgcccctgggctggctctcagagcttgggctaacgtggagcccgccacgtcgcttggcactcagaggcccctgcttcttgttggctcacgtaggccacgctcaacacgttagcctgttgccacaccctttcgaaggcccgggttaggaagggcagaagggctggtctgggctctttggtggacccctggctggttgctgccttgccctcctncca

SEQ ID NO: 6676 - DNA, 581 bp, Homo sapiens
  misc_feature (1)..(581): n=a,t,g or c
tataagtggctaaatcttccagctaaaaagtttttatttccagtagaagtagtacttgtattttttccttgactggatttggatacaggatccattgcaacatatttgatttggaaacctccagctgtcactgaagcatcacttagaaacttcaaggtcatcgacatttcctgtactgatgatgtcatctggaagctcatctccacagtatcttcccacaaagccatggacatcatcgtaactgtcatatatttcaacataatcagccaagcaacctgggtcatcttcaaggtcaaaatctaaaaaactcaggtgaatacgctgaccatacttgagtctaatgtgccagtagcagatttggttatcttcgtactcatttgggaagcctggagatttaaaaatttgctttggatctggtaaagacgccaccacactcctttgcgtgtgggttgtagcaataggcatcccatctttcactcctattgagacggattccataatcaataatgccagtttttcccaaatccacagttggggcccnggcttcacaatgggggnatccaactctggccctagccatg

SEQ ID NO: 6677 - DNA, 2588 bp, Homo sapiens
  misc_feature (1)..(2588): n=a,t,g or c
gctttctcctagggactgtgaggggcgcttctgactttggacttgagcactgcctgggacctgtgctgagagagcgctagcatgtctcagtggaatcaagtccaacagttagaaatcaagtttttggagcaggtggatcaattctatgatgacaactttcccatggaaattcggcatctgttggcccaatggattgaaaatcaagactgggaggcagcttctaacaatgaaaccatggcaacgattcttcttcaaaacttgttaatacaactggatgaacagttaggtcgtgtttccaaagagaaaaacctactcttgatacacaatctaaaaagaattaggaaggtccttcagggaaaatttcatggaaatccaatgcatgtagctgtggttatttcaaactgtttaagggaagagaggagaatattggctgcagccaacatgcctgtccaggggcctctagagaaatccttacaaagttcttcagtttcagaaagacagaggaatgtggagcacaaagtggctgccattaaaaacagtgtgcagatgacagaacaagataccaaatacttagaagatctgcaagacgaatttgactacaggtataaaacaattcagacaatggatcagagtgacaagaatagtgccatggtgaatcaggaagttttgacactgcaggaaatgcttaacagcctcgatttcaagagaaaggaggctctcagtaaaatgacccaaatcatccatgagacagacctgttaatgaacaccatgctcatagaagagctgcaagactggaagcggcggcagcaaatcgcctgcatcgggggtccactccacaatgggctcgaccagcttcagaactgctttacactattggcagaaagtcttttccaactgagaaggcaattggagaaactagaggagcaatctaccaaaatgacatatgaaggtgatcccattccaatgcaaagaactcacatgctagaaagagtcaccttcttgatctacaaccttttcaagaactcatttgtggttgagcgacagccatgtatgccaacccaccctcagaggccgttggtacttaaaaccctaattcagttcactgtaaaactaaggctactaataaaattgccagaactaaactatcaggtaaaggttaaggcatcaattgacaagaatgtttcaactctaagcaaccgaagatttgtactttgtggaactaatgtcaaagccatgtctattgaagaatcttccaatgggagtctctcagtagaatttcgacatttgcaaccaaaggaaatgaagtccagtgctggaggtaaaggaaatgagggctgtcacatggtgactgaagaacttcattccataacgtttgaaacacagatctgcctctatggcctgaccatagatttggagaccagctcattgcctgtggtgatgatttccaatgtcagtcagttacctaatgcttgggcatccatcatttggtacaacgtgtcaaccaacgattcccagaacttggttttctttaataatcctccacctgccacattgagtcaactactggaggtgatgagctggcagttttcatcgtacgttggtcgtggtcttaactcagatcaactccatatgctggcagagaagcttacagtccaatctagctacagtgatggtcacctcacctgggccaagttctgcaaggaacatttacctggtaaatcatttaccttttggacatggcttgaagcaatattggatctaattaagaaacacattcttcccctttggattgatgggtatgtcatgggctttgttagcaaagagaaggaacggctgttgctaaaggataaaatgcctggcacctttttattaagattcagtgaaagccatctcggaggaataactttcacctgggtggaccattctgaaagtggggaagtgagattccactctgtagaaccctacaataaaggccggttgtctgctctgccattcgctgacatcctgcgagactacaaagttattatggctgaaaacattcctgaaaaccctctgaagtacctatatcctgacattcccaaagacaaagccttcggtaaacactacagctctcagccttgcgaagtttcaagaccaacagaaaggggtgacaaaggttatgttccttctgtttttatccccatctcaacaatccgaagtgattcaacagagccacattctccatcagaccttcttcccatgtctccaagtgtgtatgcggtgttgagagaaaacctgagtcccacaacaattgaaactgcaatgaagtctccttattctgctgaatgacaggataaactctgacgcaccaagaaaggaagcaaatgaaaaagtttaaagactgttctttgcccaataaccacattttatttcttcagctttgtaaataccaggttctaggaaatgtttgacatctgaagctctcttcacactcccgtggcactcctcaattgggagtgttgtgactgaaatgcttgaaaccaaagcttcagataaacttgcaagataagacaactttaagaaaccagtgttaataacaatattaacag

SEQ ID NO: 6678 - DNA, 1414 bp, Homo sapiens
  misc_feature (1)..(1414): n=a,t,g or c
gaattcgcactgctctgagaatttgtgagcagcccctaacaggctgttacttcactacaactgacgatatgatcatcttaatttacttatttctcttgctatgggaagacactcaaggatggggattcaaggatggaatttttcataactccatatggcttgaacgagcagccggtgtgtaccacagagaagcacggtctggcaaatacaagctcacctacgcagaagctaaggcggtgtgtgaatttgaaggcggccatctcgcaacttacaagcagctagaggcagccagaaaaattggatttcatgtctgtgctgctggatggatggctaagggcagagttggataccccattgtgaagccagggcccaactgatgatttggaaaaactggcattattgattatggaatccgtctcaataggagtgaaagatgggatgcctattgctacaacccacacgcaaaggagtgtggtggcgtctttacagatccaaagcgaatttttaaatctccaggcttcccaaatgagtacgaagataaccaaatctgctactggcacattagactcaagtatggtcagcgtattcacctgagttttttagattttgaccttgaagatgacccaggttgcttggctgattatgttgaaatatatgacagttacgatgatgtccatggctttgtgggaagatactgtggagatgagcttccagatgacatcatcagtacaggaaatgtcatgaccttgaagtttctaagtgatgcttcagtgacagctggaggtttccaaatcaaatatgttgcaatggatcctgtatccaaatccagtcaaggaaaaaatacaagtactacttctactggaaataaaaactttttagctggaagatttagccacttataaaaaaaaaaaaggatgatcaaaacacacagtgtttatgttggaatcttttggaactcctttgatctcactgttattattaacatttatttattatttttctaaatgtgaaagaaatacataatttagggaaaattggaaaatataggaaactttaaacgagaaaatgaaacctctcataatcccactgcatagaaataacaagcgttaacattttcatatttttttctttcagtcatttttgtatttgtggtatatgtatatatgtacctatatgtatttgcatttgaaattttggaatcctgctctatgtacagttttgtattatactttttaaatcttgaactttatgaacattttctgaaatcattgattattctacaaaaacatgattttaaacagctgtaaaatattctatgatatgaatgttttatgcattatttaagcctgtctctattgttggaatttcaggtcattttcataaatattgttgcaataaatatccttcggaattc

SEQ ID NO: 6679 - DNA, 3946 bp, Homo sapiens
  misc_feature (1)..(3946): n=a,t,g or c
accgctccggagcgggaggggaggcttcgcggaacgctctcggcgccaggactcgcgtgcaaagcccaggcccgggcggccagaccaagagggaagaagcacagaattcctcaactcccagtgtgcccatgagtaagagcaaatgctccgtgggactcatgtcttccgtggtggccccggctaaggagcccaatgccgtgggcccgaaggaggtggagctcatccttgtcaaggagcagaacggagtgcagctcaccagctccaccctcaccaacccgcggcagagccccgtggaggcccaggatcgggagacctggggcaagaagatcgactttctcctgtccgtcattggctttgctgtggacctggccaacgtctggcggttcccctacctgtgctacaaaaatggtggcggtgccttcctggtcccctacctgctcttcatggtcattgctgggatgccacttttctacatggagctggccctcggccagttcaacagggaaggggccgctggtgtctggaagatctgccccatactgaaaggtgtgggcttcacggtcatcctcatctcactgtatgtcggcttcttctacaacgtcatcatcgcctgggcgctgcactatctcttctcctccttcaccacggagctcccctggatccactgcaacaactcctggaacagccccaactgctcggatgcccatcctggtgactccagtggagacagctcgggcctcaacgacacttttgggaccacacctgctgccgagtactttgaacgtggcgtgctgcacctccaccagagccatggcatcgacgacctggggcctccgcggtggcagctcacagcctgcctggtgctggtcatcgtgctgctctacttcagcctctggaagggcgtgaagacctcagggaaggtggtatggatcacagccaccatgccatacgtggtcctcactgccctgctcctgcgtggggtcaccctccctggagccatagacggcatcagagcatacctgagcgttgacttctaccggctctgcgaggcgtctgtttggattgacgcggccacccaggtgtgcttctccctgggcgtggggttcggggtgctgatcgccttctccagctacaacaagttcaccaacaactgctacagggacgcgattgtcaccacctccatcaactccctgacgagcttctcctccggcttcgtcgtcttctccttcctggggtacatggcacagaagcacagtgtgcccatcggggacgtggccaaggacgggccagggctgatcttcatcatctacccggaagccatcgccacgctccctctgtcctcagcctgggccgtggtcttcttcatcatgctgctcaccctgggtatcgacagcgccatgggtggtatggagtcagtgatcaccgggctcatcgatgagttccagctgctgcacagacaccgtgagctcttcacgctcttcatcgtcctggcgaccttcctcctgtccctgttctgcgtcaccaacggtggcatctacgtcttcacgctcctggaccattttgcagccggcacgtccatcctctttggagtgctcatcgaagccatcggagtggcctggttctatggtgttgggcagttcagcgacgacatccagcagatgaccgggcagcggcccagcctgtactggcggctgtgctggaagctggtcagcccctgctttctcctgttcgtggtcgtggtcagcattgtgaccttcagacccccccactacggagcctacatcttccccgactgggccaacgcgctgggctgggtcatcgccacatcctccatggccatggtgcccatctatgcggcctacaagttctgcagcctgcctgggtcctttcgagagaaactggcctacgccattgcacccgagaaggaccgtgagctggtggacagaggggaggtgcgccagttcacgctccgccactggctcaaggtgtagagggagcagagacgaagaccccaggaagtcatcctgcaatgggagagacacgaacaaaccaaggaaatctaagtttcgagagaaaggagggcaacttctactcttcaacctctactgaaaacacaaacaacaaagcagaagactcctctcttctgactgtttacacctttccgtgccgggagcgcacctcgccgtgtcttgtgttgctgtaataacgacgtagatctgtgcagcgaggtccaccccgttgttgtccctgcagggcagaaaaacgtctaacttcatgctgtctgtgtgaggctccctccctccctgctccctgctcccggctctgaggctgccccaggggcactgtgttctcaggcggggatcacgatccttgtagacgcacctgctgagaatccccgtgctcacagtagcttcctagaccatttactttgcccatattaaaaagccaagtgtcctgcttggtttagctgtgcagaaggtgaaatggaggaaaccacaaattcatgcaaagtcctttcccgatgcgtggctcccagcagaggccgtaaattgagcgttcagttgacacattgcacacacagtctgttcagaggcattggaggatgggggtcctggtatgtctcaccaggaaattctgtttatgttcttgcagcagagagaaataaaactccttgaaaccagctcaggctactgccactcaggcagcctgtgggtccttgtggtgtagggaacggcctgagaggagcgtgtcctatccccggacgcatgcagggcccccacaggagcgtgtcctatccccggacgcatgcagggcccccacaggagcatgtcctatccctggacgcatgcagggcccccacaggagcgtgtactaccccagaacgcatgcagggcccccacaggagcgtgtactaccccaggacgcatgcagggcccccactggagcgtgtactaccccaggacgcatgcagggcccccacaggagcgtgtcctatccccggaccggacgcatgcagggcccccacaggagcgtgtactaccccaggacgcatgcagggcccccacaggagcgtgtactaccccaggatgcatgcagggcccccacaggagcgtgtactaccccaggacgcatgcagggcccccatgcaggcagcctgcagaccaacactctgcctggccttgagccgtgacctccaggaagggaccccactggaattttatttctctcaggtgcgtgccacatcaataacaacagtttttatgtttgcgaatggctttttaaaatcatatttacctgtgaatcaaaacaaattcaagaatgcagtatccgcgagcctgcttgctgatattgcagtttttgtttacaagaataattagcaatactgagtgaaggatgttggccaaaagctgctttccatggcacactgccctctgccactgacaggaaagtggatgccatagtttgaattcatgcctcaagtcggtgggcctgcctacgtgctgcccgagggcaggggccgtgcagggccagtcatggctgtcccctgcaagtggacgtgggctccagggactggagtgtaatgctcggtgggagccgtcagcctgtgaactgccaggcagctgcagttagcacagaggatggcttccccattgccttctggggagggacacagaggacggcttccccatcgccttctggccgctgcagtcagcacagagagcggcttccccattgccttctggggagggacacagaggacagtttccccatcgccttctggttgttgaagacagcacagagagcggcttccccatcgccttctggggaggggctccgtgtagcaacccaggtgttgtccgtgtctgttgaccaatctctattcagcatcgtgtgggtccctaagcacaataaaagacatccacaatggaaaaaaaaaaaggaattc

SEQ ID NO: 6680 - DNA, 1468 bp, Homo sapiens; identical to SEQ ID NO: 6330
  misc_feature (1)..(1468): n=a,t,g or c

SEQ ID NO: 6681 - DNA, 1857 bp, Homo sapiens
  misc_feature (1)..(1857): n=a,t,g or c
gagccatgctcgcggcgatgggctctctggcggctgccctctgggcagtggtccatcctcggactctcctactgggcactgtcgcctttctgctcgctgctgactttctcaaaagacggcgcccaaagaactacccgccggggccctggcgcctgcccttccttggcaacttcttccttgtggacttcgagcagtcgcacctggaggttcagctgtttgtgaagaaatatgggaacctttttagcttggagcttggtgacatatctgcagttcttattactggcttgcccttaatcaaagaagcccttatccacatggaccaaaactttgggaaccggcccgtgacccctatgcgagaacatatctttaagaaaaatggattgattatgtcaagtggccaggcatggaaggagcaaagaaggttcactctgacagcactaaggaactttggtttaggaaagaagagcttagaggaacgcattcaggaggaggcccaacacctcactgaagcaataaaagaggagaacggacagccttttgaccctcatttcaagatcaacaatgcagtttccaatatcatttgctccatcaccttcggagaacgctttgagtaccaggatagttggtttcagcagctgctgaagttactagatgaagtcacatacttggaggcttcaaagacatgccagctctacaatgtctttccatggataatgaaattcctgcctggaccccaccaaactctcttcagcaactggaaaaaactgaaattgtttgtttctcatatgattgacaaacacagaaaggattggaatcctgcagaaacaagagactttattgatgcttaccttaaagaaatgtcaaagcacacaggcaatcctacttcaagtttccatgaagaaaacctcatctgcagcaccctggacctcttctttgccggaaccgagacaacttccacaactctgcgatgggctctgctttatatggccctctacccagaaatccaagaaaaagtacaagtcgagattgacagagtgattggccaggggcagcagccgagcacagccgcccgggagtccatgccctacaccaatgctgtcatccatgaggtgcagagaatgggcaacatcatcccccagaacgttcccagggaagtgacagttgataccactttggctgggtaccacctgcccaagggtaccatgatcctgaccaatttgacggcgctgcacagggaccccacagagtgggccacccctgacacattcaatccggaccattttctggagaatggacagtttaagaaaagggaagcctttatgcctttctcaataggaaagcgggcatgcctcggagaacagttggccaggactgagctgtttattttcttcacttcccttatgcaaaaatttaccttcaggcccccaaacaatgagaagctgagcctgaagtttagaatgggtatcaccatttccccagtcagtcaccgcctctgcgctgttcctcaggtgtaatattgttaagaaagaaaggggcaaggaaagcaagaagacatggcacgtgttctgaaaccactggtgtctgctcagatgtgttgggacaaaatgaaagtgactttcaagaaagatcagaggaatttgactcagagaaaactagatccaaatcccagctctactgtctctcccgaattagccttgggaaaatcatttatatgctaaataatttacctttttatctaggagatgaaaagaggataatgtttccttccataaagaaagttcttgtaagaatcaaaagaaatggtgagctttaagtggtttgtaaaccataaaacacatcataaaagttctatctata

SEQ ID NO: 6682 - DNA, 2655 bp, Homo sapiens; identical to SEQ ID NO: 2737
  misc_feature (1)..(2655): n=a,t,g or c

SEQ ID NO: 6683 - DNA, 1552 bp, Homo sapiens; identical to SEQ ID NO: 516
  misc_feature (1)..(1552): n=a,t,g or c

SEQ ID NO: 6684 - DNA, 921 bp, Homo sapiens; identical to SEQ ID NO: 1458
  misc_feature (1)..(921): n=a,t,g or c

SEQ ID NO: 6685 - DNA, 25000 bp, Homo sapiens
  misc_feature (1)..(25000): n=a,t,g or c
gaattcatgcatgcccctggcccctcactctccccacaaggaatgtgcatgtgtgcaaagggtaggcctggatgccatttctacaaacagttgactaaagcagtccagagcagggatctttctttgggtcattgttatgtccttattgaccagaataatgcctggcacacagtaggcactcaataaatacttgttgaatggaggaatctgcaaagctgctcagtcttcagacagcagcaagcagcaaggaagagaatcatgatgtaaccaagagcaggtgctggaggagctagggagtgagtggggatctttaaggacagcaggccctctgatctgtctgagctgtgaggcaaagcctagttagggaggtgagttctatctgcaatgagagggggcatgggtggagaacagtaacaccaaacaccaacagaccagagcctcccaaacccgaaaggagagaaacaaagtgtgattgatttcccaaatgcagaaaagactacccaagtccccagccaaggaaggaggctggcctgtggtgaagacactggctttgaaatggctcaacatcgtcccaagcaccctttgtgcatcttaattgccctgggaaacatgggaggggtggcagtttggagcttggaaagctggaaggtggggacgaaaggagtttttgcccctcatcgccaatccttgaggttcctacagggaacctcagacaacagctgtcttaggggtttccttccagctccaagcagctgtattatctatagctttgagagggtctgtctctgtcaatggggctgattcctcagcacctggcagggcctggggggggactgccagagtctgttctgccgggcatgttagtagcacagactactgggataacctcagcaactgtatacctttagcactgcagagctgcggtgttgtcagacacagcccttgcagttcgtggtctacccccacttgcctgcaccccccttatagctgctcaatgtcctcagactgtaccttagtgccttggttaccaagcaacccccacagaggcctcctcctggattttcccttccctgctatgcccacccccaccttcaaaaatgtacctgctgcacccatcccccaggcctgcctcactccttccaagctgacagctaatcagatgggactaactccatgcgcggaagagctgtgcttgggaagaagggggagatttcacaccaaatcgtgcagtggttgcctagacacggagccagtcaagcttgcatgttttgttgctagaagagcatggcatcggtggtgttctgtgctcgcaggctgggcccagctccctttcctcccctcctttgtggctgttcctcaggcctgcagaggggaagatttttcctgtcctgttactctgcctcacttgccagaacactagtcgcctccagctctggataaagctgaggctgggtgggccagacaacagctgtcttaggggtctccttccagctccaagtagttgtattatctatagctctgagagggtctgtctctggggctcaggcctttagtacctgtggggcagagcaggaacgtgagtcaggcaaaccgctccaaactaggaccaatgcagctgggtcctgctctcctgcgcatagggggaccccacatagggggaccccacatctttggaatcccagcccacctttccaggctaccctccacaggccgggctccactcccatctgctgaggtttcccaccttgaatcctgctgccccgattagctgtataaccttaaagaatgcactgtccctctccattaaaatgaagtgcttggatggattgctaaaggcctgtctggctcggaggcttggtgcctcaacacattgcctgctggtccaaggaaatcagtgcctgagccagagtccccatctctaagctccatggttattgttcttgccacctggctaggaaatgtccttccagctgccccagtctagctgcctcaccctggggccatgcccccaactctgtcctacccttctctgctgctgacactcgccccttcccagcttccagttggatacaggacctgggccaggagagcagggaggacactgtggaaaatgcggccaggccatcaggggcctcgcagcaggggactggaagggggagcagtgtccagggccagaagtgctgcgggagagccaggacattggctgcctgtggtcttggtggtcgtggtcagttccctctcctgccagctgtggaatgtgaggcctggcctgggagatatttttgctgcactttgagccaccccgccccctggaactcagaccctgcacagtccatgccataacaatgacgaccacttccaattgtttcctagctcgagagagaggcggggaggggagcactgtttgggaagggggggagcctcggggggatgcttctagtgacaacagccctttctaaatccggctagggactgggtgccgttgggggtgggggtgcctgctgccccatatatacagcccctgagaccaggtctggctccacagctctgtcctgctctgtgtctttccctgctgctctcaggtaggagcgggagctggaggctttactctgggataaggggggctccaggcttaggaaagggattcctcttggaatagcaagcttcatgcaggacttcatgcagagtaccaggtccagtcactgggcacacatgtgcaggtctaaacatgggcgtatgtgccacaggagttcctaggggaagatatctgcatctgagcatatgggaccaatatgcattacagggtgtgtgtgtgtgtgtgtgtgtgtgtgtgtggacaagcctgcatagtctgaatgtgagaaagggtatgtacctcactgactgatacagaaatatcaagtgggagatgtgggtgtatgatcacgtctgtgaacgaggaggttcctttgcagggagggagaaagaatggtggagaaggattctaggaagtgtgtaatgccttcatgtgattctgtgaggcctggaatgtctctgcagaaggaactcacaggcacgggggtgtaggatgttccaggtctttgtgtactgaagaacacgcagatgtgatctacttacgtggcacacatcctgaaatgtgcacatttgctgttgaggcatatatggcaccctggggttggggtgcggattgaggtatgggaaggaagcctgtcttcatgtgagaggcatgcccaagcagcaggcatgagtgttcataacgagggcttgtggagggtgtttggctatgtgatgggtgtgtctgtgagaggaagcccacaagtgtcttctctctgagaatgtccacaaagagtacaacaaaatggggacaggatggaaaaagaagtctctttagagtcatcagacttgcattcaagccttggctctcccacttgttgtcatgggctcttggccaagcaacccatttaacctcgatttcctcatctgtcaaatggggtgaagactgagtaggagaaagtgcattgaagtgcttttagactggaaagtgccgaacaaatgtgaccattagttgtctctcagatggctcaaagaaaggtaaccactagatgggtaccaggcaggggtgggaccatctcgcaggagtgaagaggattagggctcaaggttgagttgacaccaggaagctgttagaactagttcttgaggaaaaagggaatagggtttgaaaaacaagaaggatgggaccagagaagctgaccaccctttccaccttgttttggaagaggggtagctgaagaacagagccagggagaagcaggaaggtgggactggtcaggttgggcacagcctgccctgacacagcctcttccctctctccaggtcccctgcaggccttggccttttcctcatctgtagacacacttgagtagcccaggtaagaaaagctgaagctagagtgttgaaaatctagtaagactgggcattagagctccccaaagccagcctatggaactctagtttctgccatgtgctggagagaatatcttggctatcaagagctactacctgtgaccagggggccagggatagatgaggtcagagatggaaatagttagatttcttcctcctacagggagctcagaatgctcttccttcccctaggagagccccagcttgaacaatagtttgttgttccttttaccctggcaggtttgctaggctgctcctctggttaaggggaacctcaaagaggaagggactcactggtaactcctcttgactcttgagcatggtgctaggttttggggctcccactgaaggggagagcccagggagggaagggaagaaatgggcagatgggagggcagccagcttctgctccactccaggcacagccatgggagattcggagatggcagtctttggggctgccgccccctacctgcgcaagtcagagaaggagcggctagaagcgcagaccaggccttttgacctcaagaaggatgtcttcgtgcctgatgacaaacaggagtttgtcaaggccaagatcgtgtctcgagagggtggcaaagtcactgccgagaccgagtatggcaaggtgggtgtcaggctgatgtgagagtccaccctgccacctgtacacctgggtgacagagaggggtacacccatgccccatgcccatgcagacctgaggatggtcccattctccttccctttggggaagaatccagaccctccaaagagccctctccttcccaatatcccttctgtcttccctgtgagatcctggttccttctctcttgagcactattgccctgtcactcaccaactcctaaccctcttgaggaaggaggggaagcccaggctgacaggagggcttgggtgggggctcttgcagacagtgaccgtgaaggaggaccaggtgatgcagcagaacccacccaagttcgacaaaatcgaggacatggccatgctgaccttcctgcatgagcccgcggtgctctacaacctcaaggagcgctacggctcctggatgatctacgtgagtcctgcccctggccctacgttgggatctctgttcttgctccatccatgtccaccccaggagccaagagtgtcttctgtttgtgtctaggcagggttacactctaactcgtcccaacatccttggttcaattccaacactctggggactggcattactcagattgagtgcatgcagaggttttccttctcttctttctctcctgggatctttctctaactcccaaaatcaccagccctcccccttcgcaactggcaagtcactgctccttttctaatccccagacctactcgggcctcttctgtgtcaccgtcaacccttacaagtggctgccggtgtacactcctgaggtggtggctgcctaccggggcaagaagaggagcgaggccccgccccacatcttctccatctccgacaacgcctatcagtacatgctgacaggtgagaggccctggaaggtcttcctgaagggaactgggataggccgggagggagagggagaaggaagggagaagccccacgagagcatcctgtgcagctcctaacctttcccccccaccctctccccacagacagagaaaaccagtccatcctgatcacgtgagttagctgctactgtattccctttcagaatctccctgatcccagcctccagccccatcaggtgtcccaggccccgaggcatagactcagcctctttccccgcaacctcgtgcccatctccttcttctctgaccattaccctgacccctctctttgctctccctcttcctttctgctttccatccccttcatgtttttcctctcccacctccttcacccactctccaactcatcacgcgtttatcagagctcattatgcagcttcacctctgcattttctttcccttcagaaacatttcccattcttccagccctaccaacttttcccaaaacagcccaggcccatctcccctgtttactttgcccagccaagcacaggctcagcctgcccaaaccagtgccttctggtggctaccttcctggtgccagccctgacctctgtgcatcagaagacagttgtggattttgggtgtagataacctggcagcttcttgcccagggctcctctctcgggtaggcccaggcattctctcctgatttgaggcttgtcggtctccagtagtattgttcactgcccaataagcccctgtcttcacagcggagaatccggagcagggaagacagtcaacaccaagagggtcatccagtactttgctgttattgcagccattggggaccgcagcaagaaggaccagagcccgggcaaggtagcctgctgccctccaaggtcctgtaccgcagaaagggagggagaagagctctcacctgcctccttcttggcctctgcagggcaccctggaggaccagatcatccaggccaaccctgctctggaggcctttggcaatgccaagaccgtccggaacgacaactcctcccgctttgtgagtggtccctgaccttggccttgggacttggactggtggaggaatggtctcagatatgagccttcccccaactcatcaccactctcttccatctctaggggaaattcattcgaattcattttggggcaacaggaaagttggcatctgcagacatagagacctgtgagtgccatgaatctgctaggctcagcctaagctcacccttgctctagaccatctggtcttgacctctctctctctcccctccctccctctgtttttctcctctttaagtctctgtctgtaggtgtctctgtcttcaggtctacatatctgtctctctctgagacttcctctgcatctttctccatttctgtctctgcatggctaggtgtctttctctgggatttctctctgagatcattttaatctcttcctcgggtctcgttctatctctcgtgtgtagactctctttgtgtgtcctctgtgtctcacaactctagatgtctctctccgtgcgtctctctcctctccctctctcgtcgctctttgtcgtctgctgcatcattatcattaatttcctgtgccaaccctagacttttctttctctccttcttctccccacctgttcagcagatcttctggaaaaatccagagttattttccagctgaaagcagagagagattatcacattttctaccaaatcctgtctaacaaaaagcctgagctgctgggtgagtcagagccaccgactgagaccaactatctcatgcactgtccttgcttgctgactcagctgcatgcctggttcatggcactgctggatcaattcagtggatgtgggccaagccaagccctgtcctgtgctcttcctcaggcatgtgctgtggcgagcagcctccatgagagccgggggcttgtgtcccaccctaaccatgttttttcccctagacatgctgctgatcaccaacaacccctacgattatgcattcatctcccaaggagagaccaccgtggcctccattgatgacgctgaggagctcatggccactgatgtgagtgtgtgaggacccagccagggggtgggaggattggcagtgaggggcaaacaggggtccaaaagcagagctaagacgctggccattggttgtttaaagtggtaatggacctcctgagagccagaatgttgccctgtgatcagggtgtactggggaatggatgaggtgagacaggactggccagtatctggtgttctatcaaaccaggaagagctgaaacgcatgagacagagagacacacaagccaagaaacaagcatcaccgagggagcaggacgaggagggaaggccatgcagacggcatggggctggagggggctgttaggtgaacagatgcagacaggtatggaaggccaggcaggaagcaagtgtagggccaggaagcataagtgggtaactcagaaaagctgtggccactgacactggggctgcggccaactgacgtctgctctgctcttgcatcttacatcctttgttttggagttccctgcatcttacatggttttgttttggagctccccactgggtatgggagtctcagaaccccacaggattaaggatacagttttctctccaacttacaagggatctcacttacccatcatacttcttttttggggtccgccaatatgggggcctcctacagaacgcttttgatgtgctgggcttcacttcagaggagaaaaactccatgtataagctgacaggcgccatcatgcactttggaaacatgaagttcaagctgaagcagcgggaggagcaggcggaaccggacggcactgaaggtgggaggcagggattcttgggggcagctgtcaagtcatggagggccatgtctgctcagcagtcatctctcttctcttttttcttttttttttgagatggagtcttgctcttgctctgttgcccaggctggagcgcagtggcacgatcttggctcactgccacctccacatcctgggttcaagtgattctcctgcctcagcctcccggagtagctggaattacaggcatgcaccaccatgcctggctaatttttgtatttttagtagagatggggtttcatcatgttggccaggttggtctcaaactcctgacctcaagtgatccgcctgccttggcctcccaaagtgctgggattacaggcatgaaccacacacctggccagcagtcatctcttaccaactttgctcttgccttttccttccagaggctgacaagtctgcctacctcatggggctgaactcagccgacctgctcaaggggctgtgccaccctcgggtgaaagtgggcaatgagtacgtcaccaaggggcagaatgtccagcaggtgggtccatcttcagatgataatgggtgggcagggtagggagactggcatggtgggatgagagttttcaagttcactcttcccaacaaccctgctcaatatgggctctctcttcacgccttgcaggtgatatatgccactggggcactggccaaggcagtgtatgagaggatgttcaactggatggtgacgcgcatcaatgccaccctggagaccaagcagccacgccagtacttcataggagtcctggacatcgctggcttcgagatcttcgatgtgagttgggacccctgggagtgggagaacaatcactcactcgctcccacattcaacagctatttcttagagccagctgtggaccagacatgggaaggcagtggggactgtgtggtgacagaggcagtcatttactctgtcttcaggggaagccctccttcactgccttgacatggaggggaccagccacgcctgctgggctcaggcacagtggacggcacagccccaatggccactcacacccactttctgactgctcccacccctcatgccccctgcagttcaacagctttgagcagctctgcatcaacttcaccaacgagaagctgcagcagttcttcaaccaccacatgtttgtgctggagcaggaggagtacaagaaggagggcatcgagtggacattcattgactttggcatggacctgcaggcctgcattgacctcatcgagaaggtgcctctttggccttaccacctgaattccatcctcgacaccaacaagaacacatagacaaaatagcagcccctctcccttctggggaatataaaaatagaaggggctgaaggatccgagcccttggttcagagcctatgttgtgctgagcaccaggacagggtggcacagggacagctgatttccaggggcttgagagtggacacatggaggatgggcactgcatgatgacctccacactgcatgtttattgggcctggtatgcatccaaggatcaggaagtgtgagggtggtgtaggggatcataagagtgcacctattttcaaccctagcatctcaggcatctgggtcgtggagtggtgtgtacagcatcgatagaatccatattcccagactttcacaaaggtccttctgtcatcagacaaaatcctccaccttgaaccggttccagtcagtagataactgtactcagagctgagcctactaccttaacacccaacatggcacctccacgagcaagtatattgaccatagagcagaatccatgtcacctgtgtgaaggacactcagtgatgctctctcctgcttcctcagcccatgggcatcatgtccatcctggaagaggagtgcatgttccccaaggccaccgacatgaccttcaaggccaagctgtttgacaaccacctgggcaaatccgccaacttccagaagccacgcaatatcaaggggaagcctgaagcccacttctccctgatccactatgccggcatcgtggactacaacatcattggctggctgcagaagaacaaggatcctctcaatgagactgtcgtgggcttgtatcagaagtcttccctcaagctgctcagcaccctgtttgccaactatgctggggctgatgcgcgtaaagtagggactgaggctcccggtacaggaggagcagggattctgccaaggttctgagccaggtcaattgctacaccccaccacttcaatgtcaggttgtacccaaggtttacagactcagtgggatggaactgggtgaagaaactgaggcagccacattgaaggccctcacccaggggcccaaatgccagcaaggatgtaaagaggggctgtgattctttactcacaccctacctccccacactgatgcttcttttgttgactctccttcctgcagctattgagaagggcaaaggcaaggccaagaaaggctcgtcctttcagactgtgtcagctctgcacagggtgagtgggacacagccccagccaacttggctccccatctgcccaaccccaccccagccccacccttccctgccttgttcatcccctactcctcccgttccctgtctccttgtgcattcggaccattttcactctgtcttctcttcccgtcatctcctggcctcttcacttatttacttcccatctcccttctctcctctttcccttctgtctcccaccctctctccttatccctgtctcgccccagggccccttcatctctgtgaccttctgaattctctcatctctcttttccttccttcttctcctctcttcttcctgcatctctttctggcattttctttacttttctctattgcactttttggccacaggaaaatctgaacaagctgatgaccaacttgcgctccacccatccccactttgtacgcttgtatcatcctaatgagacaaagtctccaggtgaggccacaaactcaggccaacccactgctgggcatacaccgccctgggaacagggacctcctaggacatctccctacctaccaccacagtggtttccaaaccacaattcttctcctcccatcccgcatgaggcctcccagggtacctccctctcagcgctaccttgcacttgcagtgtgtaatgagggtgatgtgtaaggcactctgatggacattacctcatcagtggccctacaaccccttggatagctggttgtccaagacaagaatcttagttcaactttaaatttacctgcaggaaccacttaatcccccaatgagacatattcaaattgttaatccatttttggctaattaggagcagaggctcagggacctgggttcaagacctggctctgttcttgatcagcttagtgaacttgggccagtcccataaccctctgggcttaatttactcatctagaacattggatatatctgttctggctaccacctatgataataggtactgggaatcatataaaaaaggaatgtgaaagccttttagttaaaaatgtggctagaagaaaatgaaacaaatgattattactaactgacttgctaagattacaagctaatcagtgacaaagccaggatcagaacccagaacttcagtccagttctcacagactcctcctacttccttcttgccacaggggtgatggacaaccccctggtcatgcaccagctgcgctgcaatggtgtgctggagggcatccgcatctgcaggaaaggcttccccaaccgcatcctctacggggacttccggcagaggtgggtatgagggtgcaccagaagctcatagaacagggggagccaggctgccctgatgggaatgggatctgcaggtgaccctgaattcctatggggcagagcagactcactgcagagcatgggtgactctggacacttccctcctcaggtatcgcatcctgaacccagcggccatccctgagggacagttcattgatagcaggaagggggcagagaagctgctcagctccctggacattgatcacaaccagtacaagtttggccacaccaaggtgaggaaaggagactaattaattaaaggaaagacatctcttttccattgactcctctgatgcttttcctgttgtaatcatcttagcaaaatctcttacctgtatgctacccctcccagtggaacatctagcaccactcccctcatcccagctccagctgccattgacctctcctgcaatccttttctaggatgttacccttcctaaggtaatcccacatctctttcctcgtaccctccatgtcatgccacaaacttgcctgcaggtgttcttcaaggccgggctgctggggctgctggaggaaatgagggacgagaggctgagccgcatcatcacgcgtatccaggcccagtcccgaggtgtgctcgccagaatggagtacaaaaagctgctggaacgtaggtgagagatctcaagaggaggtttcccgcttctctgaggcccaggctggttcaggggcagtgtcaggaaaaaaagctcagcagatcttcaaacacagagacctgcaggaggggctcatatgaacacactgcagtcacagggtcagaggcctcaggaagggtgggagggatgaaggaaatgggatattcccaaggtttcaggacctcaggtaggaaggaggcaggaggctcagcactcctttcaatgggcccctgcagagactccctgctggtaatccagtggaacattcgggccttcatgggggtcaagaattggccctggatgaagctctacttcaagatcaagccgctgctgaagagtgcagaaagagagaaggagatggcctccatgaaggaggagttcacagccctcaaagaggcgctagagaagtccgaggctcgccgcaaggagctggaggagaagatggtgtccctgctgcaggagaagaatgacctgcagctccaagtgcaggcggtgaggctcctgggctactgttggctcttccaccctgctctgccttcacttcccacagaccctgcacctccctgcacaggggctcactgtcttgttccgttcagtcagaggactctgggatcaacacttctaaagacctccaaagaggtccctcaggaggaggaaagggcagagggaaaaggagctgacttttaaaagcacaggctttctacttgggttcaacctagatacacagcttaattattttgtgaccttgggcagaccatgcatcatctttgagcctcaagggcctctagacagggaataaagctgtccatttcattaagccatcatacataagtgcttggcatcagcaaatgcaattcccacccttcgatggaggagaccagaggaagaggtccagatgaagatttctggttcctttcctctctgctcccctccccagtgttcccaagttatactatcctgaaactcttcccctccccatacttctgaagctcttgccaagtggggatatcctagagttaccctcctatttgagtgatgtgcctctccttccctcctacctgcaagaatggaggaccttaccccctgaacagcctcccctctgttcctcaccttcaaggaacaagacaacctggcagatgctgaggagcgctgtgatcagctgatcaaaaacaagattcagctggaggccaaggtgaaggagatgaacgagaggctggaggatgaggaggagatgaatgctgagctcactgccaagaagcgcaacgtggaagatgagtgctcagagctcaaaagggacatcgatgatctggagctgacactggccaaagtggagaaggagaaacacgcaacagagaacaaggtaagggcagcctccctttggctccagcccgggtctcatcaggactctcagaccatactgaccttgacccaggctagccactcggcatccagagagcagcatggaccttgacatggagctccccacagatggcaccaagctggtgacctttgaccctaaaggagatgggattcttggtcggcaggtgaaaaacctgacagaggagatggctgggctggatgagatcattgccaagctgaccaaggagaagaaagctctgcaagaggcccaccaacaggctctggatgaccttcaggccgaggaggacaaggtcaacaccctgactaaggccaaagtcaagctggagcagcaagtggatgatgtgagtagattgagagttgtggggcctagatatgccatgtctatctgtgcccagagctctgtgtgtgtgtgtgtgtgtgtgtgtgtgtgtgtgtgtgtgtgtgtgtttgtgtttaatgtttataggggggtagggttagaggatgttaacttttctgatatctttctagaaaggagctggggaatgaaaagtcagaggtggtgatcaattctgaattatgtatctaatctcactggtatgatcaataatagagatgagttttcttatttaatttaagtgcaatcccatatatctctgcctttgacacaagatttagagggtcatctcataagacatgataaatttctttggaaattttgtgaggctccccaagtagaatttttgaaattccaatatttaagggcagaatctgatcattgttccctctgatgcacatatgtctgttgactcacttatcactctgtattttaattatttaagcttctttagataggaacttagatctattcaatttggggactgcagtgcttagcaagagcctgatgcccagtaggtgtttataggatgctgaaagaatgaatacggcggccagcggtggctcacacctgtaatcccagcactttgggaggccaaggcgggtggatcacgaggtcaagagatcgagaccatcctggccaatatggtgaaaccccatctctactaaaaatacaaaaattagctggatgtggtggcgtgcgcctgtagtcccagctactcaggaggctgaggcagaataatcccttgaaccagggaggcggaggttcagtgagccgagatcgcgccactgcactccagcctggcgacaagtgagactccataaaaaaaaaaaaaaaaaaaaggaggaaggaaggaaggaaggagagaaagaaggagagaaagaaagaaagaaagaaagggaaagaaagaaagaatacggctttggggtttcatcccacagtcatttattcctttatctataaaatatgattcagcatcccctatatctaggcaatctcacagtcccctaattaacatttggcccactctggggaaggtttcccaagtcctgaacacaagatttaccaagtcctgaggtaactgaacaacaaaatcaccaagtcaggatgctttgcctcactgggcctgggctccttctctctaccagctggaaggatccctggagcaagagaagaaggtgcgcatggacctggagcgagcgaagcggaagctggagggcgacctgaagctgacccaggagagcatcatggacctggagaatgacaagcagcagctggatgagcggctgaaaaagtactgtgtcccctccctgctgcccttccgcctccccagcccataacagtacaagcagacccaatacagccatcctctgaggcaacaacctcacgcagcctccacaagtggaggtgcaaaccatgggaaaaggcctcccaggcaagggctttcctcccctagtcccagatatcagggttagttagatggtcctccctggcaaaaagtccattgtatcccatgagtcctttcttcttgttaggcactcagtgggaatgaaaataacagccttcccccttcataacacatctctctttggagaccagttccttgacatggaggaaggctccacatgaggagcctcttaggaaagtccctttgtggcttttcacagagagcccacagggcaccaagaaatgccctcacattaaagaagtcaggggtacagggccatttctttgtttgcttaacttgtggttccaattcttagtgtagtcttccaaatgtatagacttccagacttggtaaacagtgagcttgcagaacatattttgataattgaaggtcttatggtgtttcaggctcaggactttgaaaggctttgagaatcatcataatctacatcctcatcaagtttgtgtttgcacaggaatcttcataccttcccaggcacagaatgtgttgaataaatgaataaatacacgatcctatttgattctcaaaacaccttttaaggatggtatctttaatttcactttaccaaagaggaaaataagtttcagaaaggttagctgagttacccaaagcaatagtgacaaaatttaaagaccatcagagctaaaaaggacctttgaaacaatgtagtccgaccccctcattttacattatgagaaaacaaggaccaaagatgggaatgtcctgtagagcccaggccccatcaccctgtctacagcactcctcccattacattcttgttggatttcaatctcaccgcaggtgttacacttccagggatcctacatcacccccagaagctgtttttctaatgaaatcctactctttacctgtatcattaccattttcaccactggtggaccctcctggaggccccacgagtctcccttacctcaccatccctccttccccacagaaaagactttgagctgaatgctctcaacgcaaggattgaggatgaacaggccctcggcagccagctgcagaagaagctcaaggagcttcaggtgaggtctggacacccacgcgggatgctgagtccctgggctggttctgtttcccctgccccctcctctaggtgtcctgttcacagcattacaggaatgattaatgtgtccatggaggcaggcacgcagctatcacagtgtgcccatggatacatccaaaaggggtcagtgatccacagagacctgaaaaggtcacaggcctgagggcaagaattcctggcttcctgtctcagctctgccttagttgggtgacctctgggagcccactccagatctctgggtctccatgccctcccctgttacatggaggtttttaagagtccttcgactctgatggcatgactttcctccttactctagagcagaagctgtgttaggtctttagttgtctggtcaagacaaatacggctctctcattttcaacttttgttatttttttatgactaaactgcttaaaatatccccagaacacaggtctctttgtccatctttaagagcaagtttcaaccatttccttccaataaagagcatgtagactgtcaggccctcgcctaaaggaaggctcttcaaactatcttccccaaatcctttaattcccacctctccactggaagagctaaactgacttgctgttccagagaagccgaggagccttttagagccggggggattccagtggaggggtccaggcgtgggtctgagccttgtgtctgaccaggcacgcatcgaggagctggaggaggagctggaggccgagcgcaccgccagggctaaggtggagaagctgcgctcagacctgtctcgggagctggaggagatcagcgagcggctggaagaggccggcggggccacgtcgtgccagatcgagatgaacaagaagcgcgaggccgagttccagaagatgcggcgggacctggaggaggccacgctgcagcacgaggccactgccgcggccctgcgcaagaagcacgccgacagcgtggccgagctgggcgagcagatcgacaacctgcagcgggtgaagcagaagctggagaaggagaagagcgagttcaagctggagctggatgacgtcacctccaacatggagcagatcatcaaggccaaggtaggctctgctcggcctccctcctccaacttcctcctcccacctcccctttctgtccatgtagtgtctcttccttcatggttcattttcccacttcccttcctctgcctggttctcagatcccctccttcttttcacaccttccctcttcttttctccttcagttgcacctcttacaccccttcattccccccgcccccaacatccatcatattaactctccttcccttctcaggctaacctggagaagatgtgccggaccttggaagaccagatgaatgagcaccggagcaaggcggaggagacccagcgttctgtcaacgacctcaccagccagcgggccaagttgcaaaccgagaatggtgagcctagagcaggggctccatggttcccaccacagtctccccaacctcctgagccactccagcctcgggcacaagccaatacacgcacacacagacacagagtctctccaggaaaatggggcctgagggctagaggaggaggtggggatagagaggagtgctgatctagaatggtgctccccaggtgagctgtcccggcagctggatgagaaggaggcactgatctcccagctgacccgaggcaagctcacctacacccagcagctggaggacctcaagaggcagctggaggaggaggttaaggtaagggctagactcgcgcacctggcccaagcaaggagcacactgactagccttgcatcaaatcacttcccttcccagcaataaggctggctgtggaccaacagttctccaagaattcttgctttatggagaaagctgaacccacctcctggtgcccacccctccccaggcgaagaacgccctggcccacgcactgcagtcggcccggcatgactgcgacctgctgcgggagcagtacgaggaggagacggaggccaaggccgagctgcagcgcgtcctttccaaggccaactcggaggtggcccagtggaggaccaagtatgagacggacgccattcagcggactgaggagctcgaggaggccaagtgagttctgagcagcctgacttctggctgaggcccctttgcaggcaggactcagcccagccccagcctcagcagatcccacacaggcgatgcttagctagtgtttgacaacacaggaggactctgccccggccccacctccttctcctctcagggaagctttttgctcgaattatgtttctgatccgaatataagacgtacaaaaggtttgtctgagggcagagtgcttccgtctggggcagggcactgtggcagggaaaggcagtggggagggctgcagaagcccatacctcctcaatgtccatagcgcagaggctgggccagggtcagagggtgcctgggtctccacgccctgctgggatcctctgcctgatgttctcggcccctgggacctgtcctcaggcttctccagctacacttctgaggtttcaaggattgtctttgagaaggttcatgttgtttacctctttcccccatccacaccctccatcctccccaccctctgccaccctcccctgggcaggaagaagctggcccagcggctgcaggaagctgaggaggccgtggaggctgttaatgccaagtgctcctcgctggagaagaccaagcaccggctacagaatgagatcgaggacttgatggtggacgtagagcgctccaatgctgctgctgcagccctggacaagaagcagaggaacttcgacaaggtgggccctgggtggggcccgcagccagcatgcagggcaagggggcatgaggggttcagtgagaggccagagccatcctccttggaggtgggggaggaggctgagcccaggcaggtcctgagacagaccctggacatggggctgaggcttgggggctgaagagtgagccttctccccgggcagatcctggccgagtggaagcagaagtatgaggagtcgcagtcggagctggagtcctcgcagaaggaggctcgctccctcagcacagagctcttcaaactcaagaacgcctatgaggagtccctggaacatctggagaccttcaagcgggagaacaaaaacctgcagggtgtgctgggggcccaagaggctggggaggggctgcactgcagtgttcccatatggtgccacccaagggctccaagaggcgtctgggcaaagaggcgtgtccctccaactccactggacctcagcagccctcaaaccgagttaccgtgttccccacacagaggagatctccgacttgactgagcagttgggttccagcggaaagaccatccatgagctggagaaggtccgaaagcagctggaggccgagaagatggagctgcagtcagccctggaggaggccgaggtgtgtgtgtgtgcagggcacggggtgcagggagctgagctcaggcttttggtccctgttctcatcccccgctttgtcgttttgttcactgtccatccccagagcctaggacagagcctggcacatagtaggcattcagtgaagatttgtggagtgaatgaatgaccagtcactgaactctcttcacataaacattttacccattgcatcttagctgagcttcccatttccacatacctcccggttcccacctctgcctccctctgttttcttttatactctatacctgattgcctctgtttccttggcaacactttttctcttcattttcctccttgtcttcatagctggctctcccctgtgagggcctgaatcactttctcttaggcttatttttattttctcttagattctcttttcctccaccttctgcttctttgaaccacttacaccactcttgaagtcacttcgtatccatgattagtgagcaggcccccaccctgccctgtgccctgactgtctgcctgcatcccctcccccaaccccttcccaggcctccctggagcacgaggagggcaagatcctccgggcccagctggagttcaaccagatcaaggcagagatcgagcggaagctggcagagaaggacgaggagatggaacaggccaagcgcaaccacctgcgggtggtggactcgctgcagacctccctggacgcagagacacgcagccgcaacgaggccctgagggtgaagaagaagatggaaggagacctcaatgagatggagatccagctcagccacgccaaccgcatggccgccgaggcccagaagcaagtcaagagcctccagagcttgttgaaggtactcacccagaggggactggcctccacgtggcctggcgtaagcagtagtgtcttgatacaggcaccagattcctcctgcccctaggttactgcagggacctctgacaggtgcctttagtgaagggaaccgaggctggctccctgctcatgcccactctcctgatcctcaggacacccagattcagctggacgatgcagtccgtgccaacgacgacctgaaggagaacatcgcaatcgtggagcggcgcaacaacctgcaggctgagctggaggagttgcgtgccgtggtggagcagacagagcggtcccggaagctggcggacagggagctgattgagactagtgagcgggtgcagctgctgcattcccaggtgagcaagctcccctgctgattcctgaagggagcacaggctggggctcagcaagcaaggcttagagctatgcatagatgctcaatgcttaacctacatctacccaaccctcccccaacccagaacaccagcctcatcaaccagaagaagaagatggatgctgacctgtcccagctccagactgaagtggaggaggcagtgcaggagtgcaggaatgctgaggagaaggccaagaaggccatcacggatgtaagtcccccactccaccgacccgatccagaccagtgtctctccgtgggctgggcagcaagtgtgtgaggacttgaccagaccatgtgccacctctctcctgcacacaggccgccatgatggcagaggagctgaagaaggagcaggacaccagcgcccacctggagcgcatgaagaagaacatggaacagaccattaaggacctgcagcaccggctggacgaagccgagcagatcgccctcaagggcggcaagaagcagctgcagaagctggaagcgcgggtgcgggagctggagaatgagctggaggccgagcagaagcgcaacgcagagtcggtgaagggcatgaggaagagcgagcggcgcatcaaggagctcacctaccaggtgcgacgggcggtgactccaggcagagccctggcaccatagccacagtgacaaccagctgaggagaatgaagagtttgctcttagcctcttccagggcgaggatgggaatgcagcccccgtttcactttgcctagccctgccccactctgaatgtccctagctcagaggtcagtctctgagcctcctggcctgggagctccatctcaacacccactcttagcccatcgccaggggacacacacagaattccagacaaagctcacccagtacagctcaccagaaagcaaatatgtagccagggtcacccccaaaagacaccaaaaacacacccatcccattcaaacaagcataaaaactttttcattgcccagggcagtgtggactctagctttctgaggtgttttcttagaatcagactctgaattagaatttgtttcttttccaatccaggatgtcactatctctctaagcacacttgtccttaacttagattaagtcagtgtttctggcctgcattgcagcccagaaattccatcacactcatagccccaaagtcactcccagcatgtgccgaggtccagagcagggacttcatcccgcatggtccccggaccctgaaaaacctgctccctggagcactgcacacacacaattttgtgcataatttcagagtcccactagttctttggactctttcctggtacagatcatttaaaatatttacacatatttggtaagaaattataaggagaattcaagtgtttagtgaggatcagaaagtagaattgggtcaggatatcagatgaagcagggcagggcggaggggatgctaccttctatgactgtgccatcttcaccccctgcctaccctctggcccccagacggaggaggacaggaaaaacctgctgcggctgcaggacctggtagacaagctgcagctaaaggtcaaggcctacaagcgccaggccgaggaggcggtgagtgaccctgctggggactaggcccaggggaggcataggagagctcgtccccaagccaggagtctgagaacccaggccccctctcacctcatgctcccacctcccgcaggaggagcaagccaacaccaacctgtccaagttccgcaaggtgcagcacgagctggatgaggcagaggagcgggcggacatcgccgagtcccaggtcaacaagctgcgggccaagagccgtgacattggcacgaaggtgggtccctcttttgggctttgctagtcacccccacagcaggcatacccagacagagcaccctcaaacccgggatgcttccttttcatttaattccacacacttgagccacatggccccagaggcaaggtaatgcagttctctctcatttcaaggattattccagctctaactttttttttttttttttttgagacggtgtctcactctgccgcccaggctggagtgcagtggcacaatctcagctcactgcaacctctgcctcctgggttctcctgcctcagcctcccaagtagctgggattataggcatgtgctaccatgtcatgctaatttttatattttagtagagatgcggtttcaccaatgttggccaggctggtcttgaactcctgaccttgtgatcccactcgcctcagcctcccaaagtacggattacaggcgtgacagcccagtccaggctcagctctaaagttcagcctcagaactgccccgaacatgatcctggctttgtttcctttcaaaagggcttgaatgaggagtagctttgccacatcttgatctgctcagccctggaggtgccagcaaagccccatgctggagcctgtgtaacagctccttgggaggaagcagaataaagcaattttccttgaagccgagatcctgactcttcttcactgccctgattgaagccgagatcctgactccagactcttcttcactgccctgaggacccggggatggggtctggggaggtggaaatgcaggggagtgggggcaaattcaaaggcctggcctaggaggcttcgtggagcagcactgaaaacccctttcacttcccccaaaccagccaaatgcagcagaggcgacacctctcctcccagccttctccctggtccagccaggatttaaaggagatttagggagacctcttacgcttcatggtcataagggtctagctctgttggccagaatgtccctttattactggtcgtgtgactggtgaatctgccaatgtaaagtaatccattcagcgattgagcgtcaaaatgtaggtatttccatgagcgtttttcctgttgcaatggctggcggtaatattgttctggatattaccagcaaggccagatgtttgagttcttctactcaggcaagtgatgtattactaatcaaagaagtattgctacaacggttaatttgcgtgatggacaggactcttttactcggtggcctcactgattataaaaacactctcaggattctggcgtaccgttcctgtctaaaatccctttaatggcctc

SEQ ID NO: 6686 - DNA, 507 bp, Homo sapiens
  misc_feature (1)..(507): n=a,t,g or c
ggttacaattcacattccttattctgagaatttggccccagctgtttgcctttgactccctgacctccagagccagggttgtgccttattgtcccatctgtgggcctcattctgccaaagctggaccaaggctaacctttctaagctccctaacttgggccagaaaccaaagctgagcttttaactttctccctctatgacacaaatgaattgagggtaggaggagggtgcacataacccttaccctacctctgccaaaaagtgggggctgtactggggactgctcggatgatctttcttagtgctacttctttcagctgtccctgtagcgacaggtctaagatctgactgcctcctcctttctctggcctcttcccccttccctcttcttctttcagctaaggctagctggtttggagtagaatggcaacttaattctaatttttatttattaaatatttggggntttggttttaaagccagaattacggctagcacctagcattt

SEQ ID NO: 6687 - DNA, 340 bp, Homo sapiens; identical to SEQ ID NO: 3329
  misc_feature (1)..(340): n=a,t,g or c

SEQ ID NO: 6688 - DNA, 276 bp, Homo sapiens; identical to SEQ ID NO: 5619
  misc_feature (1)..(276): n=a,t,g or c

SEQ ID NO: 6689 - DNA, 2073 bp, Homo sapiens
  misc_feature (1)..(2073): n=a,t,g or c
tggttgtgtgggacaaggtgctcctgacagaaggatgccacagctgagcctgtcctcgctgggcctttggccaatggcagcatccccgtggctgctcctgctgctggttggggcctcctggctcctggcccgcatcctggcctggacctataccttctatgacaactgctgccgcctccggtgtttcccgcaacccccgaaacggaattggttcttgggtcacctgggcctgattcacagctcggaggaaggtctcctatacacacaaagcctggcatgcaccttcggtgatatgtgctgctggtgggtggggccctggcacgcaatcgtccgcatcttccaccccacctacatcaagcctgtgctctttgctccagctgccattgtaccaaaggacaaggtcttctacagcttcctgaagccctggctgggggatgggctcctgctgagtgctggtgaaaagtggagccgccaccgtcggatgctgacgcctgccttccatttcaacatcctgaagccctatatgaagattttcaatgagagtgtgaacatcatgcatgccaagtggcagctcctggcctcagagggtagtgcccgtctggacatgtttgagcacatcagcctcatgaccttggacagtctacagaaatgtgtcttcagctttgacagccattgccaggagaagcccagtgaatatattgccgccatcttggagctcagtgcccttgtgacaaaaagacaccagcagatcctcctgtacatagacttcctgtattatctcacccctgatgggcagcgtttccgcagggcctgccgcctggtgcacgacttcacagatgacgtcatccaggagcggcgccgcaccctccctagccagggtgttgatgacttcctccaagccaaggccaaatccaagactttggacttcattgatgtactcctgctgagcaaggatgaagatgggaagaagttgtccgatgaggacataagagcagaagctgacacctttatgtttgagggccatgacaccacagccagtggtctctcctgggtcctgtaccaccttgcaaagcacccggaataccaggagcgctgtcggcaggaggtacaagagcttctgaaggaccgtgagcctaaagagattgaatgggacgacctggcccagctgcccttcctgaccatgtgcattaaggagagcctgaggctgcatcccccagtccctgccgtctctcgctgctgcacccaagacattgtgctcccagacggccgggtcatccccaaaggcattatctgcctcatcagtgtttttggaacccatcacaacccagccgtgtggccggaccctgaggtctatgacccctttcgctttgacccaaagaacatcaaggagaggtcacctctggcttttattcccttctcagcagggcccaggaactgcatcgggcaggcgttcgcgatggcggagatgaaggtggtcctggggctcacgctgctggccttccgcgtcctgcctgaccacaccgagccccgcaggaagccggagctggtcctgcgcgcagagggcggactttggctgcgggtggagcccctgagctgagttctgcagagacccactctgaccccactaaaatgacccctgattcatcaaaagtgaggcctagaattaccctaagaccctgttccacagtcctgtattccatcctagatatctactcaaaataattgagacaagtgttcaaacagaaagacgcttgtgcggaatgttcatggcagccctattcacagtagcccaaacgatgaaaacaccccaagctatatattaccagataaaaggataaacacaatatggtccatccatacactggagtattacacagccataaaaaggaatgaagcagtgatccccactacactgtggatgaaccttgaatgcatgatactgaatgaaagacatcagatgcaaaaggtcacatagtgtactgtccttttatatggaaatttccaagaaacagggccaatctgaagagatgtatagtggattggtgcgtttcagcagctggggggggggggggg

SEQ ID NO: 6690 - DNA, 429 bp, Homo sapiens; identical to SEQ ID NO: 3338
  misc_feature (1)..(429): n=a,t,g or c

SEQ ID NO: 6691 - DNA, 958 bp, Homo sapiens
  misc_feature (1)..(958): n=a,t,g or c
cgtctcagctccagaaccgactccgctccgcactggccttggtcacaggtgcggggagcggcatcggccgagcggtcagtgtacgcctggccggagagggggccaccgtagctgcctgcgacctggaccgggcagcggcacaggagacggtgcggctgctgggcgggccagggagcaaggaggggccgccccgagggaaccatgctgccttccaggctgacgtgtctgaggccagggccgccaggtgcctgctggaacaagtgcaggcctgcttttctcgcccaccatctgtcgttgtgtcctgtgcgggcatcacccaggatgagtttctgctgcacatgtctagggatgactgggacaaagtcatagctgtcaacctcaagggcaccttcctagtcactcaggctgcagcacaagccctggtgtccaatggttgtcgtggttccatcatcaacatcagtagcatcgtaggaaaggtggggaacgtggggcagacaaactatgcagcatccaaggctggagtgattgggctgacccagaccgcagcccgggagcttggacgacatgggatcccctgtaactctgtcctcccagggttcattgcaacacccatgaccaagaaagtgccaaagaaagtggtggacaagattactgaaatgatcccgatgggacacttgggggaccctgaggatgtggcagatgtggtcgcattcttggcatctgaagatagtggatacatcacagggacctcagtggaagtcactggaggtcttttcatgtaactgcctcaaggaccctggactctgctcacccccccaccactctgcctggcctcctgctgatgaggactctaagttcccaggatacaaaaggggtggcagtgtatggttcaggaatgctgaatatgggaagcaggggtgcttgtgaccctaataaattccatatcctcttccctgcc

SEQ ID NO: 6692 - DNA, 462 bp, Homo sapiens; identical to SEQ ID NO: 3232
  misc_feature (1)..(462): n=a,t,g or c

SEQ ID NO: 6693 - DNA, 465 bp, Homo sapiens; identical to SEQ ID NO: 6474
  misc_feature (1)..(465): n=a,t,g or c

SEQ ID NO: 6694 - DNA, 3457 bp, Homo sapiens; identical to SEQ ID NO: 696
  misc_feature (1)..(3457): n=a,t,g or c

SEQ ID NO: 6695 - DNA, 1486 bp, Homo sapiens; identical to SEQ ID NO: 703
  misc_feature (1)..(1486): n=a,t,g or c

SEQ ID NO: 6696 - DNA, 1167 bp, Homo sapiens
  misc_feature (1)..(1167): n=a,t,g or c
attctgagccaagtccggtgccaagcgcagctagctcagcaggccgcagcggtggcctgagcttcaggacagccagctccctcccggtctcgccttcctcgcggtcagcatgaaagccttcagtcccgtgaggtccattaggaaaaacagcctgttggaccaccgcctgggcatctcccagagcaaaaccccggtggatgacctgatgagcctgctgtaaaacatgaatgactgctactccaagctcaaggagctggtgcccagcatcccccagaacaagaagtggagcaagatggaaatcctgcagcacgtcatcgactacatcttggacctgcagatcaccctggacttgcatcccactattgtcagcctgcatcaccagagacccgggcagaaccaggcgtccaggacgccgctgaccaccctcaacacggatatcagcatcctgtccttgcaggcttctgaattcccttcggagttaatgtcaaatgacaggaaagcactgtgtggctgaataatcatgacttcttttttttctttgcacaacaacgacaacaacaaattcacagaaccttttcagcgctgaacttatttttcaaccatttcacaaggaggcagttgcatgacttttaaaagcaaaaaaggagaaactagatgaaaaagacttttaaatgccctttctgcagttggaaggtttttttcatatactattcccaccatggggagcagaaacgttaaaatcacaaggaattgcccaatctaagcagactttgccttttttcaaaggtggagtgtcaataccagaaggatccagtatcagtctcttaaatgaagtcttttcggtcagaaattacctttttgacacaagcctactgaatgccgtgtatatatttatatataaatatatcttatttaagtgaaaccttgttaactctttaattagagttttcttgtatagtggcagagatgtctatttctgcattaaaaagtgtaatgatgtacttattcatgatgaactttttataaaagtttaaacttttagttgtaaacgtaacccttttatacaaaataaatcagtgtgtttattgaatggtgattgcctcgtttatttcagaggaccagtgctttgattttttattatgctatgttataactgaaccaaataaa

SEQ ID NO: 6697 - DNA, 2255 bp, Homo sapiens; identical to SEQ ID NO: 1691
  misc_feature (1)..(2255): n=a,t,g or c

SEQ ID NO: 6698 - DNA, 40046 bp, Homo sapiens; identical to SEQ ID NO: 6477
  misc_feature (1)..(40046): n=a,t,g or c

SEQ ID NO: 6699 - DNA, 1795 bp, Homo sapiens
  misc_feature (1)..(1795): n=a,t,g or c
acgcgtccgcccacgcgtccgcccacgcgtccggtcggggccagagcgcaggtgtacctggcggccgtgctggagcacctgaccgccgagatcctggagctggctggcaacccggcccgcgacaagaagacccgcatcatcctgcgccacctgtagctggccattcgcaacggcgaggagcttaacaagctgctgggcgaagtcaccatcgcgcagggcggtgtcctgcccaacattcagggcgtgcttctgccccagaagaccaagagccaccacaaggccaagggtgaaaaccattcactaggagaggagaaacacaatggccaccaagacagagttgagtcccacagcaagggagagcaagaacgcacaagatatgcaagtggatgagacactgatccccaggaaaggtccaagtttatgttctgctcgctatggaatagccctcgtcttacatttctgcaatttcacaacgatagcacaaaatgtcatcatgaacatcaccatggtagccatggtcaacagcacaagccctcaatcccagctcaatgattcctctgaggtgctgcctgttgactcatttggtggcctaagtaaagccccaaagagtcttcctgcaaagtcctcaatacttgggggtcagtttgcaatttgggaaaagtggggccctccacaagaacgaagcagactctgcagcattgctttatcaggaatgttactgggatgctttactgccatcctcataggtggcttcattagtgaaacccttgggtggccctttgtcttctatatctttggaggtgttggctgtgtctgctgccttctctggtttgttgtgatttatgatgaccccttttcctatccatggataagcacctcagaaaaagaatacatcatatcctccttgaaacaacaggtcgggtcttctaagcagcctcttcccatcaaagctatgctcagatctctacccatttggtccatatgtttaggctgtttcagccatcaatggttagttagcacaatggttgtatacataccaacttacatcagctctgtgtaccatgttaacatcagagacaatggacttctatctgcccttccttttattgttgcctgggtcataggcatggtgggaggctatctggcagatttccttctaaccaaaaagtttagactcatcactgtgaggaaaattgccacaattttaggaagtctcccctcttcagcactcattgtgtctctgccttacctcaattccggctatatcacagcaactgccttgctgacgctctcttgcggattaagcacattgtgtcagtcagggatttatatcaatgtcttagatattgctccaaggtattccagttttctcatgggagcatcaagaggattttcgagcatagcacctgtcattgtacccactgtcagcggatttcttcttagtcaggaccctgagtttgggtggaggaatgtcttcttcttgctgtttgccgttaacctgttaggactactcttctacctcatatttggagaagcagatgtccaagaatgggctaaagagagaaaactcactcgtttatgaagttatcccaccttggatggaaaagtcattaggcaccgtattgcataaaatagaaggcttccgtgatgaaaataccagtgaaaagatttttttttcctgtggctcttttcaattatgagatcagttcattattttattcagacttttttttgagagaaatgtaagatgaataaaaattcaaataaaatgataactaagaaaaaaaaaaaaaaa

SEQ ID NO: 6700 - DNA, 38374 bp, Homo sapiens
  misc_feature (1)..(38374): n=a,t,g or c
gatctcactctgttgcccgggctggtgtgcagtggcaagatcatagctcactccagcctccacctccagggctcaagccaacctcctgcctcagcctcccaagtagctgggactacaagcacaggccacccaccacacctagctaatttttttttttttttttaagatggagtcctgctctgtcgccaggctggagtgcagtggcacgatcttggctcactgcaacctccatctcccaggttcaagtgattctcctgcctcagcctcccaagtagctgggattacaggcgagtgccaccacgcctggctaatttttgtatttttagtaaagacagggtttcaccatgttgggcaggatggtttcgatctcttgacctcgtgatccgccggcctcagcctcccaaagtgctgggattacaggtgtgagccacagcacctggctagctaatttctttctttcttttttttttttttttttttttgagagataatggggtttcactatgttgcccaggctggtctcaaactcctgacctcaagcaatccacctgccttggtctcccaaagtgctgggattacaggcatgagtcactgcacctagtttcattcaatgcttattaactgagagaatggcttggctctttcttctgtccctccctcgccaagtggcctgggccgagccccttgacttcagtgccttggtgtctgctccccatgtgtgcccttcctttaggcatcccctgggatgaagaaagttctgcatcagtcactggccagacccaacccaggatggtctgcctcagaggtgagggaggcttccttagtcctccgtcaatgccctggctatgctcaatgggtgtctaacgatcttttttttttttttcttttctttttttttttttttgagactgagtctcactctgttgcccaggctggagtgcagtggcgtgatctcagctcactgcaagctctgcctcctggattcatgccattctcttgcctcagcctcccgagtagctgggactacaggcgcctgccaccacgcccggctattttttgtatttttagcagagacggggtttcaccatgttagctaggatggtctcgatctcctgacctcgttatccacacgcctcggcctcccaaactgctgggattacaggcgtgagccaccgtgcccggcctctttttcttttcttttctttttttttttttaaacacagtctcttgctgtcacccagactggagagcagtggtgcagtcataggtcactgcagcctcaaacccctgggctcaagtgatcctcctgcctcagcctcccgagctgggaccacaggcacgcaccaccatgccctactgatttaattttttgtagagaaagaatattgctatgttgcccaggctggtcttgaactcctagactgaagcacgcctcccacctcggcctcccaaagcgctgggagtataggcgagagctaccactcccagcctaacgatctctcttgaactgcaaaacccctagcttgggctggctgaggtcaagatgagcccttccccaaggaggcggcgtcagtgcaggacagcagcttaggcagcacctaaggacttttattgaccacatgaccccctcaggggtgctagtggggtatccttcggcatcctggcagcagccgccgccacagttcttggctgagcagctcctgttccctgcgggcaccctgaagcacgctccggttctcctgggccctccggatcaggtaggggattacctcctccaaggagccatagggaatggacttatacactacatagccggcctgccctgcagggagagtgggttttgttttttcgtttttggtgtttttctgagacagagtctcgctctgttgcccaggctggagtgcagtggtgcaatctcagctcactgcaagctctgcctccaggttcaagcgattctcatgcctcagcctccagaatggctgggattataggcgcttgccacgacgcccggctcatttttgtatttttagtagagatggggtttcaccatgttggccaggctggtctcgaactcctgacctcaagttatcctcctgctttggcctcccaaagtgctgggattacaggcgtgagccaccatgcccagcctggagtgttgacagggtatgggcttgggctggggggacactccccagtccccacctggaacagagacttctgtttctgagaacatggcagattaagtgagttggataaaatttctaactgaaaaagctaaaagtcctggagcaaacttttttttttctctcttagacagggtctagccctgtggcccaggctggagtgcagtggtgtgatcacgactcactgctgctttgacctcccaggctcaaacaatcctcccacctcagcctcctgaatagctgggaccacaggcatgcacctccacgcccagctaactgtttttattttatctcaattgattaattaattaattaattaattttgagacagagtcttggtctgtcgccctggctggagggcagtggcacaatctcagcacactgaccaacctggccaacatggtgaaaccccgtctctactaaaaatacaaaaattggctgggcatggtggtgcgtgcctataatcccggctactggggaggcggaggcaggagaatcacttgaacccaggaggcggaggttgaagtgagctgagatcgtgccactgcactcaagtctgggcgacagagccagactctgtctcaaaaacaaaataaataagctgggcgtggtggctcacgcctgtaatcccagcaactctgggaggccaaggcaggcagatcacctgaggtcaggagtttgagaccagcctggcaaacatggtaagaccccatctctactaaaaatacaaaaattagctgggcgtggtggcagccgtctgtaatcccagctacttgggaggctgaggcaggagaatcgcttgaacctgggaggcaaaggttgcagtgagccaagatggcaccactggactcctgcctgggtaacagagcaagactctgtctcaaaataaataaataaataaaataaaataaaagagaaaatgagaacccagagagagaagagacacacagcaagccacttctgccccaaaagcaaaaccgaggtgctatctgatgaattcacagagttgcggggggacattgagtcagtcttcaagcctgaggtgagagttataagggagaacttccccaagttaagctggaacccaaaaatctacacccttagagtaagagttaataaaaagtcaaccctgcaaccttcccccagtcccaggaaatggtcttggccataaacagatcaaggaagaaaacagaaaaatccacctctgcgaagttggggctatgggttaacccccttatgtatttgcagctcaaatttgtgccagtggggtgtttcaagaaacctcaagctatgaatttaggataaagtgatttcgttctgcttagcacctggcagaaggaaacattaattacctggtgtcaggccctgaggagcagcacagtaaagataacaaaacacacaagaaataatacaccatgatcaagaaccagcagaaatgacagacggcagacacagagacacagccttggaaggcccacagacactggaatgacagatctctctggaaggatctggaggctgggccttggttgggaataggagaagggctctggctgggagggagtaaggcctggggcttgatgggggtgggggagccattcacatacccagtgctagagagacgtggtcacacatgcccagaagttgtccgaaacagacagtcccatccagaggaatgcccagctcccacatgctacagaaaaggccacatcatcagtccagactgtggctgcatctacagcttaaagtcagccactatgcacccatatggcggctccagtaattcaaacattgaagtatttccaaactcaatgatacataataaccagtcctttgcattccttgaaggtcccccagtgactcccagccagttccctggagccctcagacctcctcatgccccagcaaataaggggcaacgtcttgtccatctgggacctataaggacttacaggtatagcaggggttaatgtgtttgtttgtttgtttgttttaagaggtagggacttgctttgttacccaggctggagtgcagtggctcaagcactgctcactgcagtctcaacctcttgggctcaagtgatccttccacctccggaatagctgggactacaggtgtgcgccaccacacccagctgtttttttttttttaatttgttgtagaaatggggtcttgctgtgttgcccaggctggtctcaaacaatcctccaccttcgcctcccaaagtgttgggattataggcatgtgccaaccatgcctggctataaatatttttaaaattctccccagaacacctctgtccatctctggcatttgagcaaaggagaggaagggagggcccttttgtgggcacctatttcccgcccatccctccacctcataccgcttggttgcctggcgaacagattcctcattgtgggaagccaccatgaggtggcacatggggccatggcgggccacgtgcgtcagcatcagttccaggcagcggctgtaactgaagggagatgctctgttcagctcacctggtgagcgagggtcaggccccagcgactggggtgggtggggtgctcctaagcaaggggtctctggaaccagtactctgttccatctgcaccagttgtaagggacatcacttctctgagccactttcatcttctggggttttttgggggttttgtttgtttgtttttgagatggagtcactctgttgcccaggctggaatgcagtggcatgatctcagctcactgcaacctccacctcccaggttcaagggattctcctgcctcagcctcccgagcagctgggattacaggcgtgcaccatcacacccggctaatttttgtatttttagtagagacggagtttcgccatgttgcccaggctggactcgaactcctgacctcaggtgatctgcccgcctcagcctcccagagtgctgggattacaggcgtgagccaccgcacccggccccatgttaatctcttgtcactgtgagtttccgagcaacactgttgtgaggatggagtgagataagggggatatgaagtctttgggacagtggcggcggtctcacaggagagggtcgcatcacatgcacaagatgacatttccccaaggttatcactgctgcattgtcaacagaacatcactagcaacagcccaaatgtccataaatggggaactggctaaggaaattgtggtacagagaagatagtgctctatcgcgcaactgtgaaaaggaaggaagacactgtctgggtactgatatggaagaggaaatagattggcaaacaccttgcaagcatgctgcaggccacgggccacgctatgtatttcacatcctctgtgggtcttccctatcgccccccagacctgttttctacccttctctgcccctcaggaagctgacacttttgccccacatcccccatggagtcatgtgcaggaaggagtgtgggtgtctcacctcggcccctccctgctcaccctgactgtgttctgtgtgtggccacagctccctaaggtggcccctctccttcaactacagcataggggtcaaaatagcttcctaatagcttccctgactttgcccacacttccttttcgttttgtgttttttagagactgggtctcactctgttgcccaggttggagtgcagtggcgtgatctcggctcacggaatcctccaactcctgggctcaagcgatcctcccaccttgggctcccaaagtgctgggattacaggtgtgaggccctgcacctggcccctgacacttctataaacagcctcttcaccacatttcctttagttaaaaccctttgtgcagaattctgtttgctttggagaaagctaatcactcatctaattcccacatcaactctgggaggcagatgttcttattccattttaacagagtggggagactgaagctgagaggggttctatctcttgtccccaggtcacacagctagaggtggccaggctgggatttgaactcaggctgtctgatgctccagagcccaggctccttatcggtaggctagtctgcctttaaaatgcacagttgtggctggacatgctggcttacgcctataatcccagcacttggggaggccaaggcaggagggctgcttcagcctaggagttcaagactagcctgggcaacatagggagaccccgtgtctacaaaaataaaaaaatgtgttgggtatggtggtgtgcgctggtggtcttagctactggggagactgaggtgggaggatggcttgggcctggggagtcaaggctgcagtgagccaagatcgcaccactgcactccagcctgggcgacagagtgagaccctgtctcaaaaataacttaaaaaacaaatgaaaaaagccaaatatacaagggcacatattgtatgattccatttataagattgtctagaataggcaaatccacagagacaaaaagtaggttagtggtttccaggggctgaggggaggagggaacagaaggcagctgactgctcattggtatgaggttactttttggggtgatgaaaatattgtggaatcaaagagtggtgatggttgcacaattttgggaatatactaaactccactgaattgtacatgttaaaattgtgaattctatgatacgtgaattatatttcaatatttaaaataatagtgcaaattattattattattttgagatggagtctcactctgtcgcccaggctggagtgtagtggctcaatcttggctcactacaacctttgcctcctgggttcaagtgattctccttcctcagcctcccaagtagctgggattaccagtgcaagccaccacacccggctaatttttgtatttttagtagagacagggtttcaccatgtttgtcaggctggtctcaaactcctgacctcaggtgatctgcctgcctcagcctcccaaagtgccgggattacaagcgtgagccaccatgcccggccataattttttgtgtttaatgttttttacagatggggtcttgctatgttgtgcagattgggctcaaacccctgggctcaagcaatcttcctgcctcagcctcccaagtagttgggatgacaggtgcacaccactgtgcctggcttggtgccagttaagctgatggtacacaaacgtgccctggagcccctgcagatcttggacatgagcctggattccaagcgtggctaggccacctgctctgtagcctggctgagtccctgtggcccccagagaaggtaccaagaagtaaagatctaaggaggtgagggatggggccatgccactgtctgcagtgggaatgtcccaggcagtggaaacaggatgtgccaagcccctgggtaacatggaggaggccagtgtggctgtagtggagtgagggagaggaagagagggagggaaagttagggaagtgacagggagcatgtggggcttagaggccactgtaaggatttctttttgttttgttttgtttgtttgtttgtttgtttgtttgttttgagacagattctcgctctgctgcccaggctgaagtgcagtggtgcagtcatggctcactgcagccttgaactcctggcctcaagtgatcctcccacctcagcctcctaagtggctggaaccacaggcatgtgctaccacacctgactatttttaaaattttttagagatggggtctccctgtgttgcccaggctggtctccaactcctgctctcaagtgaatctctagcctcagcctcccaaagcactgggattacaggtatgagccactgcacccaaccactaggtgttattatttcctgcagaggccagctggcccgggcctacctctgactggtggcctcatagtcaggctgagtggggtcttccatcccatggagctgggccaccgctctctccttgtccagatatgcacctcgtaccagcttcactccgaaggccaggccggccctgtgcgcagcctctgcatccctccccagccgctcgaatgtgtcctatagggcacgcaggcaggttctggtaggtcagggtgtggggaccccagcctgtacctcctggaacacactgcacacctttagacaggcctggtaggtgttccacacccagggcccgccttcacccgggctgttccagcgcacagccagggcagccaccagcagcgagagcgcagggttcagtgaggtgtactccgcatccaccaggagccgcacgtgctgggcccgggcatactgatggcgacagagacgacggtcagggccccgggtgtccagcaggggcagtggagccagatcccagcaggaggggttacctgtgccacccgatgcaggcggctgagggaggcccggaggtgctggttccagcaggaggggttacctgtgccacccaatgcaggcggcagagggaggcccggaggtgctggttccagcaggaggggttacctgtgccacccgatgcaggcggctgagggaggcccggaggtgctggttctgctcagcattgaggcaggagacctggaggttctagggggcagcaggggaagtggggaaaagcttataagttgctagaaatctaaaaatgagcaatatcagttaggtactatttattgagggggttatgagcctagaatcagggctcgaatccaggcttcaccacctactgtgtgaccttgggcaagttatgtaacctttctgggcctcagtttttgtttgtttgttttttgaaacagagtcttgctctgttgcccaggctggagtgcagtggcatgatctcagctcactgcaacctctgcctcctgggttcaagtgattctcctgcttcagcctcccgagtagctgggattacaggcgcccgccaccatgcccggctaatatttgtacttttagtagagacagggtttaaccatgttggccaggctggtctcgaactcctgacctcaagtgatctgcccacatcggcctcccaaagtgctgggattacaggtgtgagccaccgtgctcagccctccctgctactctttgaacacgagggcaccttcccacctccagccctttacctgctcccatgtttccttcaagtatttgctctaatgtcactttctcaacatggttttcccacctatacattggcaacttcttttcctcttcctcagccttattttcccttacttgttacgtactgacttttgttttgctgagacggggtcttgctgtgttgcccaggctggaatgcagtggcacgatcatggctcactgcagcctccacctccccagctcaagcaatcctcctgcttcagccttccaagtacctagtaccacaggcacccaccaccatgccgggctaattctttactatttgtagagtcaaggtcttcctatgttgcccaggctggtctcagtctcctggactcaagcgatcctcccacctcagccttccaaagtgctgggattctgactttggttttaattattgtctcttgcccctgacttgcaagtaagtgcctcgaggtcagggattttgccttcatgcttcctcggcccctagcaccgtgtctggaacaagatagatgttcagcaaacacttcgggagtggatatgcttgtaacatggaaataagaaccgtttctaactcacagtcttatgcagattcatctggctgaatgtgagctgctggtgactccagggagtctggctgggttcaaagaagttgggaaatggaagaaagaggaacaggtggggctgaaagctttattatatccaacagggtcgatacagatgacataggcctgggcttgctcatggaatcccacctggaggcaggttgggctggaagctgcaaccttccgcatggtggggagaatgctgcctcctggagaagggaagacctggaggcagcagcctggtttcctcctcccctgtcagaggattgtctcctgcttgacttggggcgtagtcttaggccctcagggagctatttcagacacccaccaaatatttaactcatttaatatttaccactctctaatgtaccaactgttattatccccccattttctagatggggaaactgaggcacagagcagggaagtcacttgtcaaaagtcacacagctaactcagggcagacctgaggtttaaacctcagcctttccagagcctgggtctttctctcttttctccctccctccctccttccctcccttccttccttccttcttttttttttttttttgagatagatctcactctgtctcccaggcaagagtgcagtggtgcaagttcaagtgattcccctgcctcagcctcctgattaactggggctacaggcacgtgccaccacttctggataagttttatatttttagtagagatggggtttcaccatgttgcccaggctggtctcaaactcctgacctcaagtgatccagccccacttagcctcccaaagtgctgggattacaggtgtgagctacagcacctggcccttttttctttctttctttatttctttcttccttccttccttccttcctttccttccttccttccttcctccctccctctctttctttcttcgctctcaaacttgccagctcaagcaatcctcccaccttagcctcccaagtagccaggattacaggtgcctgccaccacacccagctaatttaaaggaattttttgtagagatgagggtttactatattactcaggttggtattgacctcctgggctcaagcgaccctcctgccttagcctccacaccaggtgtgcaccagcacacaggctgattttttaatttttttgtagagatgagatctcactatgttgcccaggcaggtctcaaactcctgggctcaagtgagcctccaatttcagcctcccaaaatgcagattacaggcatgaggcactgcacccagcctgttttaatccttaaaaccactgagaagttgctgtcactctccctacaggaataaactaaagctcatgaagaggtgaactccttactctccaaagctgattttctgaaccatgaaatcttgtttctatgtgttctctgacacactttaaaaattacaaataaggccaggtacagtggctcatgcctgtaatcccagcactttgggaggccgaggcacgtggatcacgaggtcaggagttaaagactagcctggccaacatagtgaaaccccatctctactaaaaatacaaaacttagctgggtgtggtggtgtgcgcctgtagccccagctactcaggaggctggggcaggagaatcgtttgaacccgggaggcggaggttgcagtgagccgagatcgcaccactgcactccagcctgggcaacagagccagatgccgcttcaaaaaaaaaaaaaaaaaaaaaaaaaaacgctgggcgtggtggctcacgcctgtaatcccagcactttgggaggctgaggcgggcgtttcacctggggtcaggagttcaagaccagcctggccaacatggtgaagcctcatccctactaaaaatacaaaaattagccaggtgtaatggcaggcgcttgtaatcccagctactcgggaggctgaagcaggagaacccgggaggcggaggtcgcagtgagcagagattgcgccactgcactccagcctgggcaacagagcaagactctgtcttaaaataataataataataataataataataataaataaatagataaacaaataaaaattacaaataaaaaaaggttagaaaaagaaacatcagcatgtccactatagcattgtttgggagggtggagacacagaggccacccaggggttcaccccaggagaggtaaaccatgcagcagctagaatcaactattggaaacagtgggggccgggcatggtggctcagcccataatcccaacaatttgggagggtgaggcaagaagaatttttttttttttttttgagacggagtcttactctgtcaccaggctggagtgcagtggcacgatctcggtttactgcaacctccgcctcccggttcaagcgattctcctgcctcagcctcccaagtaactgggactacaggtgtgtgccaccacgtccagataatttttgtatttctagtagagacggagttttaccatgttggccaggctggtcttgaactcctgacctccagtaatccatccgcctcagcctcccaaagtgctgggattacaggcgtgagccactgcccccggccatgttctaaatcttgatagggatttggattgctcaagtgtgtgtattggttaaggttcatcaaagggcacatttacaatgtgtgtagttcattgttttaccttgaaagaaaaaaagtactgcgaataattattgggctctaattaatgagcccattattcatatcctgaagcatttagggggaaaacatgtctgcaatttactttgaaatgcaccaaaaaataagatggattgatggatggatagaggaatagagggatagatatgatttaaagtgagtatagttaaaggtggcgggggcatggatgttcatgtacaattctttttacttttctgtatatttgaaaatttttataatagaatattggggaaaatatgccccccacgaatggtatacacctggcaaaacaaaatcatagaaacaaaaagatatgcattatacaagacggcaggctgggtgtggtggctcacacctataatcccagaactttggggggctgaggctgggggattgcttgaggccatgagttagagaccaccctgtgcaatacagtaagacaaagagaaagagagagagagagagagaggagggaggagagagaaggaaggaaggaaggaataaaggaaggaaggaaggaagggagggagggagggaggggagagaaggaaaaagaaaagaaggaaggaaggagagagagcaaaagaggaagaggaaggaaggagagagagagaaagaaagaaaaaaagatggagtagggttgaaagagaatgtggagataaaaaggaattaatgattgaatgaacaaactaagaccccattggcctaatcagaacttacacccagccagctcacacccatgcagctgtgttgactgagaacacactgatgtacctccttctaattgataaacagcttctatcccaatccctcctctgagagcctccagcctccaggctcctccctgagaacccagatgaccctgattccatccatttcaaccatgcctgggagctacagctgcacttctgctggctgttccaagcctggaggtggccgtagcattttgaacatctggcgtgcggtgtggccgcatctaagtccaaggcactctgtccccgacagtcccgcttgagatccttacctgcccagagtccatagcttcagccagcctctcggggctcagctccaaggaggctcctggccttctgacccacgaggctagctccttctgaaatggggtggtaggcggggtggtgaggggagcccgatgggcagccgcgccctccccgcacccccgtctttgcactccttacacagagccgagtactggtcagcgccgtcaccttcagctgcatgaggctggcctcagccaggctggggggctccaggaggccccgtgacaggtccacacaccgcagcatagcaccgaggttcccctcataccacgcctcactgcccagccagcaggtgtcagggcccgaacagcaaagccccttcctgcgtcctcccagcctccctgggccctggctccctactcacccactcttggcagcagagtccggctcctcctcagtgggcactgccagcagtggtcggaggctgagggtccgcagctgctgcacgcagcccttcacctcctctgctgtctcaccagccacaaactgcccatagacggatgctcggagaaatgcgcctgagagccgggagcccaggagtcgccgagaccaggcctggagctgggtgacagggagcgagggctcagcgccaggctatgaggagcctccaggctggtcctcaggatcactgctcaccaacagcccgtgagtgacgagtgggggccaggcacacagccggagaaccagcaaggcccgtgtcagctctcctgtgcccttaaggtggaaggccccgccatcaaagctcagggactgccagcccctggaggggggaccagcttgggaacagagcacgtaacaggtccggagcatcctgggtccctggctgcctccacaccagggaaggttctctggaggcagcaagttcaccaactgccccttgcccagaccaggggcagtgactgattaactgggcaaagcctcaggatcacaggctccttgggggcaattaattattaacaaatggggacagagttcagagtaacggaaacgggaggtgaaccccagtaacagcccccaagaatgctcagcacaacagcctgcacttattaggtaaccaccatgtgctggggaaagcaggggctccggagcaaggatccctgggctcaggacaccgggctttgtgatccaggacaggctacttaatcacttttgtggcaattgcttcctcttaaaattggaaacgctgtagtgttattgaatacatttgaaaatacggttctcacgtttgtaatcccaacactttgggaggccaagaccgaggagtttgagactaccctgggcgacatagtgagaccccatctctacaaaaaatacaaaaattaactgtgtgtggtggcacacacctgtggtcctagctactcaggaggccgaggaaggtggatctcttgagcctgggaggtcaagggtgcagtgagctgtgattgtgccactgcactccaccctgggtgacaaagtgagactctgtcgccaaaaaaagaaaaaagaaaagacaaataacctatataacccagctgttccatgctaagtacatatcctagagaccttaaacatggacagcaggaaacatgtacaggaaagaatgttcagaggagcagtgtctgaactacccaaatgtccatcaaaaggagaatggatacatatatggtggtgtagttatgcaatggaatactatacagtaatgaaaaagaatggatactgatacacacaactgtgtggctgaatctcacaatgtcaagtgaaagaagccagacaccaaacagggcaagctgtattattcttttttttttttttttttttttttttttgagacacagtttcactcttgttgcccaggctagagtgcaatggcacaatctcagctcactgcaaccttcaccccccgggttcaagcgattctcttgcctcagcttccagagtagctgggattacaggcatgtgccaccacgccccactaattttgtatttttagtagagacagggtttctccatgttggtcagactggtcttgaactcccgacctcaggtgatctgcccgcctcagccttccaaagtgctgggattacaggcatgagccactgtggctggtctatacttttcaataaatataaaagcaaggaaagtgaaactgcagtaaaatgttgggaatacatgcgtgggtggtcaaactatgaggacaagaaaagtaaggacatgattatcacagaagtcagagaggtggttgattgtgggggatgggaggaattgtaatggggtagagggatatggggacttctatatcctattttctttttttaaaatggaaaccatatgtcttaatttttttgttttgttttgttagacgtatccttgctctgtcacccaggctggagtgcagtggtgcgatctcggctcactgcaacccccatctcccgggttcaagtgattcttctgctttagccccctgagtagctgggactacaggcacccaccaccacacctggctaatttttgtatttttgtagatatggggtttcaccatgttggccaggctggtcttgagctcctgacctcaagtgatccaccctacttgtcctcccaacatgctgggattacaggcgtgaagtcctaggtctttttttttttttttttttttttttgagacagagtcttactctgttgcccaggctggagtgcagtggcacgatctcggctcactacagcctctgcccccgggttcaagcaattatcctgcctcagcctcccgagtagctaggattacaggcgtctgccaccgcgcctggctaacttttgtgtttttagtagagtcacggtttcaccatcttggccaggctggtcttgaactcctgacctcatgatccacctgccttggcctcccaaagtgctgggattacaggtgtgagccactgtgcctggcagtggcttctaggtcctaggagtcctaggtcttaacatggatgatgattcatagttgttcacattgtaaggttttttttgttttgtttttgagacagagtcttgctctgtcttccaggctggagtgcagtggggtgatcactgctcactgcagcctcaaacttctgggctcaagcaatccccccacccaccacctccacctcccaagtagctgggattacaggtgcatgtgatcacaccgagggtaatttttaattgtttttttggtagagacagagtcttactatgctgcctaggctggtcttgaacccctggactcaagcagtcctctcaccttgggcctcccaaagtgttgggatttcaggcatgagccacggcacctggccctcacattgtaagttttttttttttgagacggagtcttgctctgtcccccaggctggagtgcagtggcgcaatcttggctcactgcaagctccgcctcctgagttcatgccattctcctgcctcagcctcccgagtagctgggactacaggcacccaccaccacgcccggctaattttttgtatttttagtagagacggggttttaccatgttagccaggatggtctcaatctcctgacctcgtgatccacccgcctcggcttcccaaactgctgggattacaggcgtgagccacactgcgcccggccttgaaatttttatttattttcttatttatgtatgtatgtatgtatgtatgtgtgtatttatttatttattcatttttgagacagggtctcactctgttgcccaggctggagtgcagtggcacaatttcggctcactgcagcctcaacctcccaggctcaggtgatcctcccacctctgcctcccaagtagctgggactataggcacatgccactatgcccagctaaatttaaaaaaatttttttttcctttcttttttgtgatgggggatctcactctgtcacccaggctggaatgctccagcatgatcatggctcactacagcctcaaactcctaggctcaaacaatcctcctaccttggcctcccaaacgctaagcttataggcatgagcctctgtacttggcctgccttttttttcttttctttttttttttggctccatcttgctctgttgcctaggctgcagatgtctgctcactgcaacctccgcctcccaggttcaagtgattctcctgcctcagcctcccaagtagctgggattacaggtgtctgctaccatgcccggctaatttttgtacttttaggagaggcggggtttcaccatattaaccaggctggtcttgaactcctggcctcagatgatccgcctaccttggcctcccaacgtgctgggattacagacgtgagccaccacgcccagcctagggcctcatccccagaaatgtgattactgggtaggcattggggtgttgaaagctcccctggtggttcaaatgttcacccaggtgaagaggcacggcccctacaatcggacaccttagcctctctaaatggggtcctccctccctctttgtcttttcactgtccctggaacacacccagcttcctgctgttgcatttccgctgttccttttccctgaaaactccacccttccttctttccctaattaactcccacctgccctcaggtgtcagggtttaagacaccccctcaaggaggtctgccttgagcagcccctcccagatgagggggagttttaccctttcacattttaacaccagccttgtagctcttgtcatgtttattcgtctgtgagtgaagactcagtttctctccccacgcccctgctagactgtgaacaccatgaggtcggggggtcacatttggttttgtcattaatttatccctactgcttaacacaggacttatttttgttgaatggacttatttttgttgaatgggtaactaatttaatagatttctttggtatttgctggacaagggacttatagattgcatcacatcaattcaagcagattctggataagacccacctttttttttttttttttttttgagacagggtctcactctgtcgcccaggctggagtgcacaatgtcggctcactgaaacctccacctcccgcattcaagcatgctcctgcctcaggctcccgagtagctgtgattacagttgcaggccatgaggcacacgccaccatgcccggctaatttgtgtgtgtgtgtgtgttttttttttttttaagtagagacaggtatttcacattgttggccaggttggtctcaaactcctgaccttgtgatccgcccgcctcggcctcccaaagttctgggattacaggtgtgagccaccgcgcccggcctcgaagtttttttgtttttttttttttaatgagacatagtcttgctctgtcaccagctggaatgcacggcgcgatctcggctcactgcaacctctgcctcctgggttcaagcgattctccacctctgcctcccaagtagctgggactacaggcgcacaccgccacgcccagctaattttttgtattcttttagtagagatggggtttcaccatgttggccaggctggtctcgaactcctgagctcaggcaatccgcctgcctcgacctcccaaacatggccttgggaatcgccatgtttgggtggacccagttgggtggcctgcatttgcatattaaaggttgccggcctggttctaagagctgctttaaaaacaaaaacctccaggccacgcctgtaatcccagcactttgggaggctgaggcgggcggatcacctgaggtcagcagtttgagaccagcctggccaacatggtgaaactccgcctctactaaaaatacaaaaattagccgggcgtgatggcgcgtgcctgtaatcccaactactcaggaggctgaggcaggataatcgcttgaaccggggaggtggaagttacagtgagccgagatggcgctattgcactccagcctgggcaacagagtgagactccgtctcaagaaaaaaaaaaaaaaaaaaaggtagaaattagagagtatagaagagaggcaatcttggaagaaataatggctgagaattttccagaactgatgaaaaatacatattcacaaagaagcaaagatatcttaagctagataaaacaaaagaggccgggtgtggtggctcgtacctgtaatcccaacactttgggaggctgaggcgggcagatcacgaggtcaggagttcgagaccagcccggccaaatggtgaaaacctgcctctactaaaaatacaaaaattagttgggcgtggtggcacgtgctggtaatcccagctactcgggaggctgaggcagaagaatccctcgaacctgggaggcagaggttgcagtgagctgagatcgcccattgcactccagccttggtgacagagtgagactccatctcaaaacaaacaaacaagcaaacaaacaaacaaacactaaagaaatccatgcctaaacacatcatactgaaatggcagagcattgaagctaccgaggtctattatttatctttgcatcctccagagtgtagcctggactagatgctccaccaattcaattacatcaagagggtgggtatcccaggttgagaccacagacaaattaaaggcaaggaggtagaaacaaatatggctataagaaggaaaagcatttttctcacctatctgaggcacacaacctggattgggggaaagtgaagttgaaaatgagagtgtgggagagggagagactaggtggagagaatttttgtttcgttttgttttagagacagggtcctgttctgtcacccaggctgtagtacagtggtgtgatcgatcatagctctcatagctcactgcagctttgaactactgggctcaagggatcctcctgcctcagtctcccgagttgctgggactacaggagtgtggcaccacagctgggtaatttttgtgttttttgtagagatggggtctctctgtgctgcctgggctggtctggaactcctggtctcaggtggtcctcctgtctcagcctcccaaagtgcttggattacagacatgagccacccacacctggtcactggggaatcctgagtgccctgcaaaacagaacacaatgggctgctcaacagtagccatggaaggttctggaataaagttcccagccggtccttctgtgggtgattgtccattttgtggtaagaggcaaaggggctctaacaccagcagagaggcagagccataggtgggagagtccctcttattctctctggttgggtcaccaggtgaccccataccaatcactgggattgaagaataaggtattccagccagctccagtgctgtgcctgtttctggagcttcaagagtgctcaaccaatgcacaaaacctacctggggcgtggtggctcatgcctgcagtaccagcactttgggaggccgtggcgggtggatcacctgaggtcaggagtttgagaccagcctggccaacatggcgaaacctcttctctactaaaaatacaaaaactagctgggggtggtggcaggcgcctgtaatcccagctaccgggaggctgaggcataagaatcgcttgaacccgggaggtggaggttgcagtgagccaagatcgcataactgcactccagcagcaacacaggtgcactctctctctaaataaacaaataattaaaaacaaaatgaaacaaaaaactggactcatgcgtgactctgatggttccaggaggtgatacatatacagaacatagaatgtgagctggcatgtgttaggagctcataaatgctgtctgtcactgctgctgcagcgactcattggcttcctgtcacccacaggataaagcacaaacccataagatgagctttgtggtttatctttggccatctcactagccttaattcctaccactccctgacttgggggttattctccagcaacaattttagggaaatcccttcccacactgtgctcctggagtcttctttgtctccagcccctgcacagctacttatcccttaatactggagtttggtgacagcttaggagcagaggacagtccagccagttttaatctccagcacagacctctctcctgagctctggaacccaatgtacacacacacacacacacacacacacacacacacacacacacacacacacacatgctcattcagaatcccctcatggattggttcttctcaaacgggacacgaccgcaccctggtgggagcttgggaaatttgcataattgtttttggctgcagcattgattggagggcattacaggcatctagaggcaggaccaggaatgctggacgctgaaatctgcatccagaacagtttgtaaatgtctttgcaggcgcttctgtgcgtaaaataagtttacagttatctgaaattattaatataacacatataccatacacacaaaattttggtatggtttaaaatatattgacattttctgaaatgaaactatgatgtaaatttatttttatttatctattttttttggagacagaatctcgctctgttgctcaggctggagtgcagtggtgccatctcaactcactagaacctctgcctcccgggttccagtgattcttctgcctcagcctcccaagtagctgggtttacaggcctgtgccaccacgcccagctaattttttgtatttttaatagagagggagtttcaccatgttggccaggctggtctcaaattcctgacctcaagtgatcctcctgccttggcctcccaaagtactgggattacaggcgtgagccactgtgcccggcttctgatgtaaagaaagtgaaaattgtgtacttttttgttcagaatggcaccaatggttatacatcatatcagaagaatcacaattccaacaatgccacctatgagatgtaatgtaaaattctgaatgaagtatagcacacataaagaaatgtgcccatatcatgtgttcagtatgaattttcaggaagtgaccagaaagtaaatttgacgcaagtgacacttgaataactaacacccaagtcaagaaaacaacttcgtaatcccagcacttcgggaggccaaggcaggaggatcgcttgggcccaacctggacaacatagtgaaactctgtctctacaaagataaaaaattagccatgtgtggtggtgcacacttgtagtcccagctacacaggaggctgaggtgggaggatcgcttgagcccaagagttggaggctgcagtgagccatcatcacaccactgcactccagcctgggagacagagcaagacaccatatcaaaaaaaaaaaaaaaaaaaaaaagaaagaaagaaaagaaaacaacattatgaggattctcaccccaagccttcctggtgccagtttcaatcaccatccccctctctcccaaaggtaaccagactctttgtttgtttgttgagacagggtctggctctgttgcccaagctggagtgcagtggtgtgatgatggctcactgcagccttgaattcctgggctcaagcaatcctcccacctcagcctcctgagtacttgaggctaccgttgcacaccaccatgtccagctaatttttgtattattttgtagaaacagggtttcaccattttacccaggctggtctcaaactcctggtctcaagcaatctacacatcttggcctcccaaagtgctgggattacaggcatgagccccggctcaggttatgcacttttatagtcagtagtattagtaacatgtggttgtatccttctcagtaatttttttttttttttgagacagagtctcgctccgtcgcccaggctggagtgcagtggcacggtgtcggctcactgcagcctccgcctcctgggttcaagcctcctgagtagctgggattacaggcacgtgccaccactctcagctaatttttatatttttagtagacacagggtttcacatgttggtcaggctggtcttgaactcctgacctgaggtgatctgctcacctctgcctcccaaggtgctgggattacaggtatgagccaccacgcctggccccttctcagtattttatatcagggggctccttgtgtcagtttgtcccatgactggtagcatcaactttgatcatctggtgaaggtgacatctgtcaggtttatccactgtgaaattactatttttccccaagtaactaatgcaatacatgctttttaggctctactaatttgagtttccaccccttgcaaattatttatttcctcctcagttaactaaagacctcattcaaactggtttaagagtgaaggacatttaggccgggcgcggtggctcacgcctggtaatcccagcactttgggaggccaaggagggcggatcacaaggtcaggagatcgagaccatcctggccaacacggtgaaaccccgtctctactaaaaatacaaaaaattagccgggcgaggtgacaggtgcctgtagtcccagctacgtgggaggctgaggcaggagaatggcatgaaccctggggcgcggagcctgcagtgagccgagatcgcgccactgcactccagcctgagtgacagcgagactccgtctcaaaaaaaaaaaaaaaaaaaaaagagtgaaggacatttatggttgcaactaactgaaaatgacattcagactgacctaagtggggagggaaactggtagtctagaagtagccctgacttcaggtgtggctggatccagtggcttggtacaactaggcatttgtcttgttcatcaatatctgtatagattaagggggactagatccggggaaggcagaagcaatagatgtccgctacactgaatcagaaaaaggagaggaggaagtaggaactgcatgaagagacccagccacagcctgcggttactttggagagcttcttccaagtggttcatggtgctgagcaacccaggacctggcttagcagcatattccttggccacagtggttggttccaggacaggcataagacccagcctgggctgatgaaagacagccccagagctttccagaactattggcataaagaggcactctggctgctgagctcatgggataccagcctagaactacaagtggtcttctctgtttcccaaataaagggtctacccgagaatgaagctagaccttgcatggctatgtttcaatactaggtctggcagtgtctgaagccaacgctaccccctgcaattgtcagctgcaagagccaacaaatttcctttcctgcttaagccaatgtagaatagaatgttctaggttttgcagggaatggtggctcacgcctgtaatcccagcactttgtgagactgaggcgggcagatcacttgaggtcaggggttcaagaccagcctggccaacatggcaaaaccccatctctactaaaaatacaaaaattaattgggcgtggtggcgcacacctgtaatcccagctatgcgggaggctgaggcaagagaatctcttgaaccaggaggcagaggatgcagtgagccgaaataacgccactgcactccaacctggactacagagtgagactctgtctcaaaaaaataaaataaaaaagaataaaaatacaaaaattatctgggtgtggtggcatacacctgtagtcccatctacttgggaggctgaggttcaaaaattgcttgaacccaggaggcaggggttgcagtgagccaagatcgtgccactgaactccagcctaggtgacagagataaactgtgtctcaaaaaaaaaaaaaaaaaaaaaaaggctgggcacagtggctcacacctgtaatcccagcactttgggaggccgaggcgggcggatcacaaggtcaggagttcgagaccagcctgaccaacatggtgaaaccccgtctctactaaaaatacaaaaagttagctaggcgtggtggtgggcgcctgtagtcccagctactcgggaggctggggcaggagaatcacttgaaacaaggaggcagaggatgcaataagccgagatcgtgccactgtattcgcagcctgggtgacaaagtgagactctgtctcaaaaaaataaaaataggccaggcgcagtggctcatgcctgtaatcccagcactttgggaggccgaggcgggcggaccacttgaggtcaggagttcgaaaccagcctggccaacatggtgaaaccccgtctctactaaaatatacaaaaattagccaggcgtgatggcaggcgacttaatcccagctacttgggaggcagaggcaagagaaccgtttcaacctgggaggcagacgttgcagtgagcagagttcgagccattgcactcaaacctgggggataagagcaagacttctctcaaaataataataataataataataataataataataataaaaaataaaaacaaaaataaaaaataaaaattaaaaaagaatgttgtaggttttttctttgaaaaggaaaaatatacaattacatgttgttggctgtggatttatttgaaacaaaaagaaaaaatatacaattagaaaaattctactgttagaaatgaagtcaccttttaattacagggaaatcatttagatcttaatgtgtttatgtattccagtgctgtggtgtaaaaacttattttagtctgtgctgataaaaaataacattgtcatacaacaattggggtgtatttgtaaaaaagaaaacaaaagaaaaataaatatattgacaaacacgtgaactagaaagttttgataatatggttaatcaagtagaagtgtggtctgaagaaagtctgttcttcatggaaacaggtgggcttctcagctatcctgctattcaatagaaagatggagccaggcgtggtggctcacgcacacctgtaatctcagcactttgggaggctgaggcgggtggatcacttgaggccaggagtttgagaccagcctggctaacatggttgaaaccccatctctactaaaaatacaaaaaattagccgagcctggtggcggccgcctgcaatcccagctactagggaggctgaggcaagagaattacttgaacctgggaggtggaggttgcagtgagctgagatcgtgccattgcactcctgggtgacaaagcgagacaagaaaggaagggaagagaagggaacgggaggggaggggaggggaggtaaggggaggggagggaaggggaggggaggggagggaaggggaggggaggggagaggagggaaggggaggggaggggagagaagggaagggcagcggaggggagagaagggaagggaagggcaggggaggggaggggagggaaggggaaagagagagagagagacagagacagagagagagagaaagacaggaaagaaaagaaggaaggaagggagggagggagggagggatcctcttactgggctgttattatgaagcctgtttttaaaatcacttttattgagatatcatttatgtacaataaaaatgcacccatcttaagtgtaaagttcaatgagttttgacaaatctgtgcacccgtgcaaccaccaccacaatcgttatatagaatatttccaacacctcagaaagttctcccatgcctttttgcagtcaaccctcctctcatggccccaggaaacctctgctgtgctctctgccaccgtagattagttttgcctattttagaatttctataaacgaaagcacacacacagtacatattcttttcctctagcttcttttgattgtctgtttattttaatgcttatggagcatacttatgtttacatgtgtcatagtttatgcctcctgtgttagataactgtcggaaataataaaataataggtaggatgcaacatggattcataaattccacttattattagctatttcagacgtcatggaatgcaaaatgaacagagtttttcatatgtctttccccacttctgaaaactttacttcatgaagcacttagggaccctcagaatagcattttattttttatttttattttatttttattttttgagacagaatctcgctctgtcgcccaggctggagtgcagtggcgtgatctcagctcactgcaacctccgcctcctgggttcaagcaattctcatgcatcagcctcccaagtagctgggactacaggcatgcgccactactcctggctaattttttatatttttagtagaaatggagttttaccatgttggccaggctggtctcgaactcctgacctcaggtgatccacccgcctcagcctcccaaagtgctgggattataggcgtgagtcaccgcacccggcagcatttcatttttgagacgacgtttacaatctgccctgtccttttggagaagtttagtttctaaagccaaccccaggatgcaccttgtttctactctggtaccagctgaaccatctctgtcactcagccccctccatgtcctctcctgacaccaagtccctttgggttttatggagctcacctaaccagctcggcccaggctgtaatgagagagaccagtggagtgtaaattcctgcaggtgcaggacaatggggttgagagggctcttacaccagatgtcccctcagctcgaagggcagagaatcgggttccagagtgtccaagtctccggccacctggtcatagattcctcttggatcctgatatgtgtcttcaggccagtggaggtcccagggtccctgacaggcaaaaagtggagttagaaccatggagagatgccctgtaggtcttcattgaagatctgggggatacatgcccctgcttaacttcccagaaaaaagtgttttagcttttactaaaatcccaacatatacaaaaaaggagtgtgattataatgaatgcttatgatgaaccccatgtgcttatcacctaacttcaacaatatcaggctgggcacggtagctcatgcctataattccagcactttgggatgccaaagcaggaggattgcttgagaccaggagttcgagaccagcctgggcaacatagtgagatcctgtatctacaaaaaataattttatttttcttagacagggtctggctctgtcacccaggctggagtgcaatggcacgatcttagctccctgcaacctccaccttctgggctcaatccatcctcccacttcagcctcccaagtagctgggactacaggcatgcatcaccacacccagctaacttttgaattttttttttttttaaagacgaggtttccattgtggcccaggctggtcttgaactcctgagttcaatcgatccacccgtctcagcctcccaaagtgctgggattataagtcactgggattatgagccactgcaccgagcctataaaaaatatttttaaagaaattagctaggtgtggtggtgagcgcctatagtcctagatactcaggaggctgaggtaagaggatcgcttgagccccggaggtcaaggctgcagtaagccatgatcatgccactgcactcccgcctgggtgacagactgagactatctcaaaaaaagaaaaaaagaaaaaagaaaaaaccagtagcaacccttggtcaattgatttctctgtatttctatcttgttcccctccccgactaactggattattttgaagcaagcccaagatacccaatgatttcatgttagaaaaataatgtaaatgtcagaaatataaaacctttaggccaagcatggtgactcatgcctgtaatcctagcattttgggaggccaaggcaggtggatcacttgagatcaggattcgagaccagcctgggcaatgggcaaaaccctgtctctactaaaaatacaaaaattagccgggcatgatggtgcatgcctgtaatcccagctacttgggaggctgaggcaggagaatcgcttgaacctgggaggtggaggttgcagtgagctgagattgtgctactgcactccagcctgggttacagagcaagcctccatctcaaaaataaataaataaataaaatttttaaaaatgaaaactttaaaagtccatgttatcaggtatggcaactgtggaatgtaagttatgattatattgtcctatgaatttccaaaacagttccctaatcataatagaaaaacaaaacaaagcaaaaccaaacaaacaacaacaacaaaaagaacatgaatggtagccctaactggggatgtattttgttctagggctgggagaaaatgattattttagttcagcaaactttagagcagattggcccatgctccaaatatggcctgccacctgcttttttatactgcccaagagctaagaatggtttttatttttttctttttctttttctttttttttgagacggagtcttggtttgttgcccaggctggagtgcagtggcgcaatcttggctcactgcaacctccgcctcccgggtttaagcgattctcctgcctagcctcccgagtaggtgggactacaggcgccagccaccacacccggctaactttttgtatttttagtagagacggggtttcaccatgttggtcaggctggtctcaaacttctgaccttgtgatccgcccgccttggcctcccaaaatgctgggattataggcatgagccaccgtgcccggcctggtttttcattttttaattgttgggaaaaaatgaaaaaagataacatttgtgacatagaaaaattacatgaagttcaaattacagtgtccaaaaattaagttttgtaggaacatagccacactcattcatttatgcatcgtctatggctgcttttactttacggtggcagagtttgtgtagagtttgaggaagaccgtatgtcccacacagcccaaagcatttactactatccggccctgttcggaaaaagcgtgcagcctccatctacgctttagagagtgcatatggtccagcaccatggacagcgctttgcgccatgctggtgaggagctaggatctgacaacagtcccggtatcggaggtcgttcacagagacagaaggaaatccttggcccaggaggtgccagagcatcagccaaggccacacaggaaatcaggggttctgtcccatctccctaactgtgcagcaatgggtggggattggctggtggtcaaagtgcctgtctgttgtttttgcctgtacagccaccatcctcatttccctgtgagctctctgtccctctcctactctcagcccagtgacctgagtggggctggcccctactccctgatcccatggtgaactggcccaggcctctcctgttagcatattccatcccctgactcagggatgtgttcagtgatgaggatgtgacccaagctagaccaattaagtgtcagcattgggcatttggggccactggaaaacaggtatactctttctttgaagatttctaatctcgtaggatacaaatctagattttctgggaatattttttccctttcttttttgaaacagtctctcaggctggaatgcagtggcacaatcagggctcatggcagcctcaacttccctggctcaggcattcctcctacctcagcctcctgagtagctgagaccacaggcatgcaccaccatgcccagttaattttttaaactttttttttttttgagacagagtcttgctctgttgcccaggctggagtgcagtggcatgatctcggctcactgcaacctctgcctcctgggttcaagcgattctcctgcatcagcctcccaagtagccgggattacaagtgtgtgccaccacatccagataatttttgcattttttgtagaaatggggtttcaccatgttggccaggctggtctcgaactcttgacctcaggtaatccacccacctcagcctctcagagtgctgggattactggtgtgagccaccatgctcggcttaacttttttttttttaaagatggggtattattgtgttgcccaggctggtctccaatacctgggctcaagcaatccacctacctcagcctgctgagattagagatatgagccgtgaccatgcctagccataaaaacatttttagggaagaaattctgggcccagctgggcctgatgacaattgtatgccttgatttttcagttgaatgggcccccaaattctctctttctctctctttaaccagtggagtagatatggctaattatctttaaaaattcatgtctacttccttccacagtagcagaattgcagcaaggcacatcactgctaagctagaccacatttcacagcctcctttgccgtcagatgtgaccatgtgactctcttcccaccaggggagtgagagcagagtggtgtgcaccatttctgggcctgggccacaaggcagggttgtgcctcctccacattctttcaccttttcccatgggttgaacccccagtgaactggctcattcatgtagactcggttgacttgagcagggccactcacgtctgactgaaaaagaaatagactgccttctttttttcagagacagggtcttgctctgttgcccaagctggagtgcagtggcaccatcatggctcaccgcagcctccaactcctgagctcaagggatcctcctggctcagcctcctgagtagctgagactacaggtgcacacctccatgcctggctcattttaaaaaatgttttgtagagacaagtcactatattgcccaggctcgtctcaaacttatgggctcaagcgatcctcctgccttggcctcccaaagtgttgggattacaggcatggaccatcatgcccagccgactgtctttaagccactggatcatggtcaggcctctttgttacagcagctagctggccctaactaatacaagcaataggaggtaggctcccagcactagccaggaaggatggttgctgatgcaaagcttctcaccatctgcacttcatcgtagaggggtccccaggctccagacggggggtacgttctttctacctcatcatacaagtgcccagggaaggccatatcctcatcttcacctgtgaaacctggagttggagtggaagggagacacgatcaaggcacccagtccaggcgtcgggggtacctctgagtgagggaatcctgacatggtcctaactcacctcgggaataagacacctcctcctgcgtcgggggcagctgggggctgaagtccctcagggagcggtaatacggctctgcctctgttgtgctgacctgttccccacacgcaaaacaaacaaagccctttccatcctctgaccccactgtgcccggaagggcaatgatcaacctgatgctaacggcagggcttcagtcgccgtcggtgccctgattgtggggtcaccagggccacccccacttaccgtggagctctgagtgtcccgctctcctgtccactggctctcctcatattcgttcctgactcggtcctcttccgaccttccaggatgaaggtgtggggggaagttgagtgctgccccccgccaccagtctcccccaaacctccctcagagccttctttacagaaaaatatccccacttaccctgcctctgtcttctctgagatgcctgaaggaaacaggaataaagggctcagtgaccctatgcaagccccccaccccggccccaggaagaccttcagtatgcagcaaccacagggttccctatcaccctcgggtctccaccctggcagggaagggtctctcctcaccctcagcaagacgcctgagtctccgctgccagaggacccccccgacacaggaggcattggagaggagcagaagccccccaagagcgaacagcacaggcagcaggggcagccccgagggtcctaggggtggaagatacccctcagtgaatcccagacaacaggctgtaggccaggggtgggtctccccgagaaagtgtagccctgaccaagtccctcccccagggtcagagaaacagatgggcagaggtctctgtgcccaccctttctgcccacccaagggcaggtggcttctttcttaagtcaagccattagcaaaacttcctccgtttgcttgaactctgcaaactcagaacggaactctggactcaggagggagcttcagctcgttagctgggcactgaagactttctgtggtccagcctcttcccacgcctccagccatgcccaccaaacttagaccctggtactggactgtccagccacacaaatcaaccaccagctgtttccagaatcactgaagcaaattcacacctcagagctttggaatagttaagtgtctgtcctcaaatgtcctttcttctcaagcaaacttctgtttgcctttcaaattctatctcaaggtcaggcgctgcagcacatgcctgtaatcccagcatgttgggaggtcaaggtgggagaatcgcttgagcctaggagctcaagaccagcctaggcaacatagtgaggctgattctttacaaaaaaaattaaaaatttagcagcatggtggtgcatgtctatagtcccagctactcgggacactgaagcaagaggattgcttgaacctggtaagtcaaggctccagtgagctatgatagcaccactgcactccagcctgggcagcagagcaagaccctgcctctgaaaaaaaaatcccatctcaaggacttctttattttattttgttttttaattaagacggagttggctgggcacggtggctcacgcctataatcccagcactctgggaggctgaggggttggatcacaaggtcaggagttcaaaaccagcctggccgatatggtaaaaccctgtctctactaaaatacaaaaaattagctgggtgtggtggcaggcacctgtagtcccagttacttgggaggctgaggcaggggaatcacttgaactggggaggcagaggttgcagtgagccgagatcacgctactgcactccagcctgggtgacagaatgagaccctgtctcaaaaaaaaaaaaaaaaaaaaaagagtctcactctttcacccaggctggagtgcagtggcatgatcttggctcactgcaacctccacctgcagggttcaagcgattcttctccctcagcctcccaagtagctgggattacaggcgcatgccaccacacccggctaattttttttttttttgtatttttaatagagacggagtttcgccatgttggacaggctgttcttgaactcctggcttcaagtggtctgcccaccttggcgtcccaaagtgctggcattataggcgcgagccaccgtgcccagcctcaaatgacttctttccaccaacttccatcccagccaatatcaggctgacttggctgctatatccctgaggacaaggctgaacccctctaagtaggcatctgttgggcgggcaatctcccctgtcttctactaatagcacttttttcccctggggagaacagccactccccaatctcagtcttgggttcaggcaggactccacagtgggcacatggcccggcctggaaaataagagtctccattcctctctccacagtgattgtttagacacaggcatttgacccaacgtgtgtttttaacaaaacatttaggacaattctactagctgtcaagaagatggaggtggaggagggcttctctgcccctctgattgaagaaactcagaaagaagccaccacagatgaaggcaaagttgagagagggtgagaaacagatcgctggtgagatttttgagcacctgaaagtggccacacttggaattttttatttcatataccaagactttttcttttttttcttgagacagggtctcaactctgttgcccaggctgcagtgcagtggcgtgagctcggctcattgaaggctcaacctcctgggctcaatcaatcctcccgcatcagcctcctgagtagctgggactgcaggcatgcactgccatgcctggctaattttttttgtttttgttttatagagatggggtttcaccatgttgcccaggtttgtctccaacgtctgggctcaagtgatctacctgcctcagcctcccaaagttccgggattataggcatgagccactgtgcccagccaagccattctttttcgtgttgacaaaacagctgcatttctgtcacttgcaacctttttctcgggctctgaaggggatttttttgccaaatggttgcaatcatctcccagtagtcacatccttgagtgcggggcctttccacactgactctgtgttgagccatgtgacttgctttggccaatgagacacaactatgacggaatcagctagtaaattgctgcttttgacccccgtgaccacctccatgtgaaaaagtcaagaagagacacgcgcccagttatctccattgttccaaccaagagccagatgactatcagaagtgtgggaagggggcaaccctagaccacccagtccagtggagctgccagctgactgcagagatgatttaagccagcccagaccagcactgttccgccagactcagaatcatgaggaagaatgttgctataagcacccatgtttggggtggttcattatacagcaaaagctaactgatgcaggcttcttacaggacatggagtgagctaattcttacggaattaaactaaatttggaagagaagaaaatttatcactccaggcaagaggaagatctaagaaaaaaaaaattggccagatgcagtggctcacgcctgtaatcccagcactttgggaggctgaggtgggtgaatcatgaggtcaggagttaaagaccatcctggctaacgcggtgaaacctcatctctactaaaaatacaaaaaattagctgggcgtgttggcacgtgcctgtagtcccagctactcgggaggctgaggcaggagaggaagccgggaggtggagatagcagtcagccgagatcgcaccactgcactccagcctgggcaacaaacagagcaagaatccatctcaaaaaataaaaaaataaaaaaaaaaaatgccgagtgccgtagctcatgcctgttatcccagcactttgggaagctgaggcaggcagatcacttgaggtcgggagttcgagaccagcctggccaacatggtgaaaccccgtccctactaaaaaagtacaacaattagccaggtgtggtggcaggtgcctgtaatcccagcaactcgggaggctaaggcaaaagaatcgcttgaacctgggaggtggaggttgcagtgagccaagattttgccacttcactccagcctgggcaacagaatgagactctgtctcaaaaaaaaaaaaaaaaaaaagaaagaaagaaagaaaaaagaggaagctctaaggagtctgcaagtctgcaattctgcagggacagaactaagtcttttttttttttttttttttttttgagatagggtctccctctgttgccaaggctggagtgcagtggctcagtcatagctcactgcatcctccaactcctgggcttatgcaatcctcccacctcagccttctgagtagttgggactacaggcacatgccactacacccagctattttttatttttgcaaagatggagtcttgctatgttgcccaagctggtctcaaactcctgggctcaagtgatcacatgccttggcctcccaaagtgttgggattacaggcgtgagcgactgagcttggccagaactaagtcgttaagcagctgtgactacaagcagaggaggtagggtcagagaccaggaggttccattctcaggggagccgggagggatcaggggactgaggacttgcctgaaggtggctctgtgggcagctggtcttcaggttctccagaaggctggtggagacctggggggtggatatacagattgtgacttaacactaagaatctgagataagctttaaatatttctcagcctcttcttaagcctattagattcatgggaactggtatatgactgcttaagaatatttcaaagagagctagaaattgctgataataatgacaatactattaatagcaattctaatggtaacgctaatgctaagaataatttgttttttgagactgaacctctctctattgcccaggctggagtgcagtggcgcaatctcagctcactgaaacctctgcctcccgggttcaagcaattctcctgcctcagcctcccaagtagctgggactacaggcacctgccactatgcctggctaattttttgtatttttagtagagatggggtttcaccatgttggccaggctagtctcgaactcctgacctcgtgattcgcccacctcggccttccagagtgctgggattacaggcgtgagccactgcgcctggccatttttttttttttaaagagacagggtctcactctgtcgctcaggctggagtgcagtggtatgatcatagctcactgcagcctcgacctcctgggttcaagctatcctcccgcctcagactcctgattagctgggactacaggcatgcatcaccatgcctggcccaaaaattaactgttgatgagcactttcggtgtgcaaggtccttttcacccgaattatcaatttgttgagttaaccaaaaaagactttgggctctcgatcccttaataaaggtacaagttctaaagcaaaggaggcaagtgtcatactttatgttttagtgttcaaagggaagactggagtggggtggggggaagagcagagaagattgtaggggtgaaaaagtgtccttacttccattgagaaaaagcctgctctgtcaggaagaggaaaacagaaaggagaagcttgcggccaggagtggtggcacacgtctgtaatcccagcactttgagagactgaggcaggtggatc

SEQ ID NO: 6701 - DNA, 38374 bp, Homo sapiens; identical to SEQ ID NO: 6700
  misc_feature (1)..(38374): n=a,t,g or c

SEQ ID NO: 6702 - DNA, 149480 bp, Homo sapiens; identical to SEQ ID NO: 284
  misc_feature (1)..(149480): n=a,t,g or c

SEQ ID NO: 6703 - DNA, 835 bp, Homo sapiens; identical to SEQ ID NO: 2798
  misc_feature (1)..(835): n=a,t,g or c

SEQ ID NO: 6704 - DNA, 1549 bp, Homo sapiens
  misc_feature (1)..(1549): n=a,t,g or c
cttcagccgtgtatgcaaatggataaccggttgcctcccaaaaaagttccaggtttctgttcctttcgctatggattgtctttccttgtgcactgttgtaatgttataataacagcacagcgtgcgtgcctgaacctcacaatggtagtcatggtgaatagcacagatccacatggtttgcccaacacctccacaaagaagctcctggataatataaagaaccctatgtataattggagcccagatatccagggaatcatcttgagttccacctcctatggtgtcatcatcatccaagttcctgttggatacttctctggaatatattctacaaagaaaatgattggctttgcattatgcctcagctctgtgttaagcctgctcatcccaccagcagctggaattggagtagcttgggtcgttgtatgtcgagcagttcagggagcagcccaggggatagttgcaacagcccagtttgaaatatatgtcaaatgggctcctcccctggaacgaggccgacttacttctatgagtacatcagggtttttgctgggaccctttattgtcctacttgtgactggagttatctgtgaatctctgggctggcccatggtcttctatatttttggtgcttgtggctgtgccgtatgtcttctctggttcgttctgttttatgatgaccccaaagaccacccatgtataagcatcagtgaaaaggaatacatcacatcctccctggtccagcaggtcagttcaagtagacaatctctgcctatcaaggctatacttaagtcgcttccagtctgggctatttccattggtagttttacgtttttctggtcacataacatcatgacactatacactccaatgtttatcaactccatgcttcatgttaatataaaagagaatgggttcttgtcttcccttccctatttgtttgcctggatctgtggtaacctagcaggtcagttatcagacttcttcctgaccaggaatattctcagcgtaattgctgtccggaaactcttcacagcagcaggatttctccttcctgcaatctttggtgtctgcctgccttacctgagttccaccttctacagcattgtcattttcctaatacttgctggtgcaacaggcagcttttgcttgggtggagtgtttataaatggcttggatattgctcccagatattttggatttattaaagcatgttcaactttaactggaatgataggaggactaattgcttccactttgactggattgatccttaagcaggatccggaatccgcctggtttaaaaccttcatcctgatggcagccattaatgtgactggcctaattttctaccttatagttgctacagcagaaattcaggactgggctaaagaaaaacaacacacacgtctctgaagtgtgaaacagagcacttgcagagcctgggacaacctccttattgaagggaagagggaccagcacatgaggctgaggctgaggggcagtcaccagcaccaggaagaaggtggtaggaggagtcctaggggct

SEQ ID NO: 6705 - DNA, 1890 bp, Homo sapiens; identical to SEQ ID NO: 6479
  misc_feature (1)..(1890): n=a,t,g or c

SEQ ID NO: 6706 - DNA, 2148 bp, Homo sapiens; identical to SEQ ID NO: 6480
  misc_feature (1)..(2148): n=a,t,g or c

SEQ ID NO: 6707 - DNA, 1496 bp, Homo sapiens
  misc_feature (1)..(1496): n=a,t,g or c
cgcactccctgctgggtgagcagcactgtaaagatgaagctggctaactggtactggctgagctcagctgttcttgccacttacggttttttggttgtggcaaacaatgaaacagaggaaattaaagatgaaagagcaaaggatgtctgcccagtgagactagaaagcagagggaaatgcgaagaggcaggggagtgcccctaccaggtaagcctgccccccttgactattcagctcccgaagcaattcagcaggatcgaggaggtgttcaaagaagtccaaaacctcaaggaaatcgtaaatagtctaaagaaatcttgccaagactgcaagctgcaggctgatgacaacggagacccaggcagaaacggactgttgttacccagtacaggagccccgggagaggttggtgataacagagttagagaattagagagtgaggttaacaagctgtcctctgagctaaagaatgccaaagaggagatcaatgtacttcatggtcgcctggagaagctgaatcttgtaaatatgaacaacatagaaaattatgttgacagcaaagtggcaaatctaacatttgttgtcaatagtttggatggcaaatgttcaaagtgtcccagccaagaacaaatacagtcacgtccagttcaacatctaatatataaagattgctctgactactacgcaataggcaaaagaagcagtgagacctacagagttacacctgatcccaaaaatagtagctttgaagtttactgtgacatggagaccatggggggaggctggacagtgctgcaggcacgtctcgatgggagcaccaacttcaccagaacatggcaagactacaaagcaggctttggaaacctcagaagggaattttggctggggaacgataaaattcatcttctgaccaagagtaaggaaatgattctgagaatagatcttgaagactttaatggtgtcgaactatatgccttgtatgatcagttttatgtggctaatgagtttctcaaatatcgtttacacgttggtaactataatggcacagctggagatgcattacgtttcaacaaacattacaaccacgatctgaagtttttcaccactccagataaagacaatgatcgatatccttctgggaactgtgggctgtactacagttcaggctggtggtttgatgcatgtctttctgcaaacttaaatggcaaatattatcaccaaaaatacagaggtgtccgtaatgggattttctggggtacctggcctggtgtaagtgaggcacaccctggtggctacaagtcctccttcaaagaggctaagatgatgatcagacccaagcactttaagccataaatcactctgttcattcctccaggtattcgttatctaatagggcaattaattccttcagcactttagaatatgccttgtttcatatttttcatagctaaaaaatgtttgacatcctttgagatattttattactaaaatctgcc

SEQ ID NO: 6708 - DNA, 391 bp, Homo sapiens; identical to SEQ ID NO: 2803
  misc_feature (1)..(391): n=a,t,g or c

SEQ ID NO: 6709 - DNA, 305 bp, Homo sapiens
  misc_feature (1)..(305): n=a,t,g or c
gctgtgtttccactttattaaatcatcacagtaaatcagaattaaagagtaaaagaggttaactggagagtcgggtggctgccatcagtggagatgtgtgctttctcggtgtggctgcctgggccgcggtgtgtcctggtgcacacacgtctgcaaggtgttcccaccacctaggaaggaacctagatgtggagcattaggaaaattaaataacaagagacagcaaaataagaatcaaatgacacgctataacttaatttaccatatttatcaaattttttccttatttacatgtactaaacatt

SEQ ID NO: 6710 - DNA, 244 bp, Homo sapiens
  misc_feature (1)..(244): n=a,t,g or c
gagaacttaacagatactttattgctcacctttcacacaaagcacacctccagccattttctttcacagcttgacaatgtttacatgtacaaaaacccagcaagaagcatcatgtcatgtagatttcagtaagggagaatgtaaaacatcaactcagccaggcttttgttttctgcagcaataataaagggcctcctgcacttagcaaaaatctgtcttaactttgtagtgcatttcttccatt

SEQ ID NO: 6711 - DNA, 479 bp, Homo sapiens; identical to SEQ ID NO: 562
  misc_feature (1)..(479): n=a,t,g or c

SEQ ID NO: 6712 - DNA, 276 bp, Homo sapiens
  misc_feature (1)..(276): n=a,t,g or c
gtttgtttttttcctttttcccaaagccaattcattttacaacgaaggacaactgagcagtcggttaagttatgcctttgttttcagagtggagtttatagcctcactagaagatttacaatccataaggccataagatgatgctgtgcttagatgaacaattttatagcgtgaagatactaagacatcccccaagagagtttgggtgctagatcagttatttattggtaattttttttcccttacaaaaccaaacaaaaaattctgctatggttc

SEQ ID NO: 6713 - DNA, 339 bp, Homo sapiens
  misc_feature (1)..(339): n=a,t,g or c
tttttcagaatattcaactttattttccattgacaaacacgacataaataacacacatttattaaatacacagactagccatgacttgaatgccagcaaaagtctaacgtacttttcatacgctcttttattttttgtctccacagtattgaagaccagcctttaaaacatactagaagatatatttaaatacactgacgataactacccataaaactttacatagaggtgataaaagagacttttccatttaatcaagtatatagagatggatgctgaggaggagaggtgaagaacactatgcttttgatactgatctttacaatatggattaaagtg

SEQ ID NO: 6714 - DNA, 448 bp, Homo sapiens
  misc_feature (1)..(448): n=a,t,g or c
tttttttttttgagatcacaggctttattcctacaaccacagggcttgagctgcactggggcaagaaaacagagtttcatctgagaatgtctcttatgggctgggttctgttcaggggagggtgggaacagaggacaaggaagacaagctcctctggccctaggaacaaaacacatttactccttcaaagaagcagatgatctgaataccctctggagactgaatctgcccatacagcccctggagccaatgggagacagtactggcatctggcacaaaagggaattcagacccagaacagaagcagcaaaatattttaaaaatagtaaattgttcctggactcacaaatcattgtttttaagggcaagtgcatgcccaatataagtactggggcttcctaagagagctgacataggattacacagctgcctccctgcttcagtggag

SEQ ID NO: 6715 - DNA, 315 bp, Homo sapiens; identical to SEQ ID NO: 1717
  misc_feature (1)..(315): n=a,t,g or c

SEQ ID NO: 6716 - DNA, 261 bp, Homo sapiens
  misc_feature (1)..(261): n=a,t,g or c
ggaggaactgatgaattcattttaatcacagaaatttgcctgggcttgagcaaactgtggggactcaatagatttggaggcctcctctcccttctgagaggcctgcctgcttcctgccctgatgaatccctaatttcagtacaaactgaggaacttgaaaaacatctgtgcactgggaccgcccctcacaggagggctgaaagagcacagctgagtcagcggcacattcagcaggcgttcagtggggaagcaggagacaga

SEQ ID NO: 6717 - DNA, 295 bp, Homo sapiens
  misc_feature (1)..(295): n=a,t,g or c
tattctttcaaaatatattttattagcggcacatggaatgtcaagttaagcaaattctttccagagagaaggtgagcctgacagactaaaacgttgagcacggatgatacagcagaaataacatttccagtgtaatgagagataaagaggaatactgcccaccgaggaaatgactttcttcaccatgctgaccacactgcacagcgcccgatccggctggtgaggatggggaggtgggaagaatctcaaagcactggacagggtgaggactcaggaagtcacggggtcagcccta

SEQ ID NO: 6718 - DNA, 379 bp, Homo sapiens; identical to SEQ ID NO: 3403
  misc_feature (1)..(379): n=a,t,g or c

SEQ ID NO: 6719 - DNA, 546 bp, Homo sapiens
  misc_feature (1)..(546): n=a,t,g or c
gcggccgcccagcccacgtacaggcccgcgcccatctcgcgcttctgcgctcgggcaccacggggttgtagaagtcccggataatggtgttggccgaccaggacaccggcacgagggtgagcagggcggcgagaaggaacagcacgcctgccacgatggtgatcttggccttggcgtgtcgtcctgcacgcagttggtgcactgggcgcccaccagcgcactagcagcccgaagcggtccagcaggatggccaccacgatgagggcgcgggccgctgcaaggtcctgtggcagtgcagcagcgagtcgtacaccttgcactgcatctggccggtgctctgcacacgcagttcatccacaggccctcccagatgttctgccacgtgatgatgttgctgccgatgaaggccgacacgcgccacatgggcaacgcgcacacacgatggtgcccagccagcccagcacggccagcgcggtgcccgtgatctccaggcccatggacatggctgccgcggcaaggcccgctccaccgggtggctccgggtgc

SEQ ID NO: 6720 - DNA, 169 bp, Homo sapiens
  misc_feature (1)..(169): n=a,t,g or c
cagggagaggaaattctgttaattccacgtttattaatcacacagctctctgcagactagacactaaaacacacaattgtcaaaaactagaaaaatgagttatgtccacgttttaaaagcaaaactttataaatttcttaccacactcattcccaagttttatcccaca

SEQ ID NO: 6721 - DNA, 430 bp, Homo sapiens
  misc_feature (1)..(430): n=a,t,g or c
atattaaaagactttattcacaatagagaaattttacaaatataatttttaaaaattatgtgtcaatctattgtttcccataacattggagatttatatataaagttgaaaatgacagaatggatttatgtaaaaataaaaaacaatcaatgtacacaatgtgtagctcatatgaaaacctcatgacaagtcattgagttctgtaaactgccatacaacttacatgtgtaatattaattgcacaaagtatatcaagacatattgaagaaacacaaaattaagtgctattttaacggttcatctttcagtatgtgaatacgtatacaaatttaactgcacagttttgttgaaaataagtttcaacaataagacttcagttgttaaaattaacccaaaatataactttaattaaattacatcactacaatat

SEQ ID NO: 6722 - DNA, 464 bp, Homo sapiens; identical to SEQ ID NO: 2133
  misc_feature (1)..(464): n=a,t,g or c

SEQ ID NO: 6723 - DNA, 385 bp, Homo sapiens; identical to SEQ ID NO: 3202
  misc_feature (1)..(385): n=a,t,g or c

SEQ ID NO: 6724 - DNA, 301 bp, Homo sapiens
  misc_feature (1)..(301): n=a,t,g or c
gcttcagatcatgtttattgkggggccagggggtagggatcctcgggtgagagggctggctggccggggtaagttgctctggacgtgctggcggggagcagtcctggtggcgggatggcgggggcacttctgggtcccagggtgcacgggatccgggcagtgctcagggtggcaagaggcggcgtgcaggcacctggggcgccggggtctctaggcgtttcacacgsagcagcgcccccagcacgccctcagggggcagctcagagcccacatcgtggtcggcggcacggcggaggcggcg

SEQ ID NO: 6725 - DNA, 173 bp, Homo sapiens
  misc_feature (1)..(173): n=a,t,g or c
gggtaaggaaatagtttatnactgggtggcgggtgggggtaggggtggaaaacacagaaaaggagaggtccataaatatcccttaaggattccattcatgaagatgttggcaagggcaggggagtggtggggcggttatagcaaaaaaggtcaggcctcattgctgaatccag

SEQ ID NO: 6726 - DNA, 305 bp, Homo sapiens; identical to SEQ ID NO: 5905
  misc_feature (1)..(305): n=a,t,g or c

SEQ ID NO: 6727 - DNA, 287 bp, Homo sapiens; identical to SEQ ID NO: 5318
  misc_feature (1)..(287): n=a,t,g or c

SEQ ID NO: 6728 - DNA, 439 bp, Homo sapiens; identical to SEQ ID NO: 676
  misc_feature (1)..(439): n=a,t,g or c

SEQ ID NO: 6729 - DNA, 367 bp, Homo sapiens
  misc_feature (1)..(367): n=a,t,g or c
ttggntatgggttctgtttattaaaatcctattgctcctactggccctgtgtcccgcctccattcctgtggttggggggaaggaagggcaacccgacccctttccactggccccatcagccctcagtggtcacgggcagtagccgntcctccagcagggttatggcaagcatgaggcagccccccagcagcagccccagcccctgcaggagcacatggggcntaggcaggggntccggagacggaagcagggntgggtagcatntccacaagggccacatagaggaagaccccagcantgaccccaaacacccagggagtgagggggacagggcccagggntgagccccacccgaggatttgcancc

SEQ ID NO: 6730 - DNA, 409 bp, Homo sapiens; identical to SEQ ID NO: 6494
  misc_feature (1)..(409): n=a,t,g or c

SEQ ID NO: 6731 - DNA, 414 bp, Homo sapiens; identical to SEQ ID NO: 6495
  misc_feature (1)..(414): n=a,t,g or c

SEQ ID NO: 6732 - DNA, 267 bp, Homo sapiens; identical to SEQ ID NO: 3420
  misc_feature (1)..(267): n=a,t,g or c

SEQ ID NO: 6733 - DNA, 301 bp, Homo sapiens; identical to SEQ ID NO: 6499
  misc_feature (1)..(301): n=a,t,g or c

SEQ ID NO: 6734 - DNA, 434 bp, Homo sapiens
  misc_feature (1)..(434): n=a,t,g or c
tttatttgttctttttattattatttttaagttcacctacagctgcagtacacacacaccgctttatttggctagctgctattcagaagacacttcctgaattcaggaaaaatttttttaaaaacctgagaacaattcctgtgacttcttagctttgatgaagtgcatttactttgacattgatatagcttgtaactacttttggaatttttttcccctaacactttgatctcattaagggtattacaccttttccaccagaaaatgcagaggtatcatctttcttggaaaccaattgaaagcgtcccattttaacaaaatgacataaaattacaaacatttacatgattaaattcaaagcctgatccatctggtggtaagaaatgttaacttattttaaaagatgtatttggcattattaaaatatagtaacg

SEQ ID NO: 6735 - DNA, 544 bp, Homo sapiens; identical to SEQ ID NO: 6503
  misc_feature (1)..(544): n=a,t,g or c

SEQ ID NO: 6736 - DNA, 512 bp, Homo sapiens; identical to SEQ ID NO: 6506
  misc_feature (1)..(512): n=a,t,g or c

SEQ ID NO: 6737 - DNA, 428 bp, Homo sapiens
  misc_feature (1)..(428): n=a,t,g or c
aatggtatttattctagcaaccacaacattgttacaaaagcacaattttaataggcttatctgctaagatgcttttataagcagctgtcacctatacagagttatgaatcatctttggtgctcaaggaacctgtagaagtaagagacatcatcatacagagaaatgtagttaagttaagttgaagcttggaaaagatcacatgaaaaaaatctagctcttgccttatctcttcctaagttaagcataaattagccgtctgcaatagccgcctgtaagacaaatgataacagaagacaatcacacatggtgaatcggtttccagtggagtttttcttctaaagagacagtaaacaggtcacaactcattccttgagaaaggattcctattaaatacccagaaacagctatcaaataaacagccaaagcn

SEQ ID NO: 6738 - DNA, 228 bp, Homo sapiens; identical to SEQ ID NO: 735
  misc_feature (1)..(228): n=a,t,g or c

SEQ ID NO: 6739 - DNA, 513 bp, Homo sapiens; identical to SEQ ID NO: 6510
  misc_feature (1)..(513): n=a,t,g or c

SEQ ID NO: 6740 - DNA, 435 bp, Homo sapiens; identical to SEQ ID NO: 6513
  misc_feature (1)..(435): n=a,t,g or c

SEQ ID NO: 6741 - DNA, 453 bp, Homo sapiens; identical to SEQ ID NO: 741
  misc_feature (1)..(453): n=a,t,g or c

SEQ ID NO: 6742 - DNA, 359 bp, Homo sapiens
  misc_feature (1)..(359): n=a,t,g or c
gaatggacaataagcttttattgcattgaaaggtcattgcagtgaaaggttggggattgcttgctgctacagctgaatggattctattctgaccaatacacacagaaagagatcacagactccctaccttagaagaagggaggtggtagatgaaatgaactgtatgaagagccactagcctggcccacacacagaagaaggactggcccgtcttcttgaagcccatgctctggtagagggccatagcagagagctggatggtgccggtgtccaggataacttcactgtagccctggtcccgggcaaacttggaggacagtccttgaccagggcttttgctatcccccgacgacaggggc

SEQ ID NO: 6743 - DNA, 262 bp, Homo sapiens; identical to SEQ ID NO: 6516
  misc_feature (1)..(262): n=a,t,g or c

SEQ ID NO: 6744 - DNA, 435 bp, Homo sapiens; identical to SEQ ID NO: 6517
  misc_feature (1)..(435): n=a,t,g or c

SEQ ID NO: 6745 - DNA, 317 bp, Homo sapiens; identical to SEQ ID NO: 6522
  misc_feature (1)..(317): n=a,t,g or c

SEQ ID NO: 6746 - DNA, 414 bp, Homo sapiens; identical to SEQ ID NO: 6523
  misc_feature (1)..(414): n=a,t,g or c

SEQ ID NO: 6747 - DNA, 348 bp, Homo sapiens
  misc_feature (1)..(348): n=a,t,g or c
aatcagagtaatanctttatttccaaattcacttttacagcaacagtcagtgtaaatcatttgttaaaacacacaatacactatatagacattcacagacagaaagctaagctaagatgatttcatgtccctccccccaccctcagaattaccgaagaaatcatgggacttgcaagtgccagaaatagtcctgctcaacatggcaaactcatggggctaagtctattaggaggtgaggctctaggccagtgcccagggtaacccttttcaaagctgaagagaaatcagaagttttatgaagccgcaggtctgtagatgggacacgcaggtgatcacctctgccctcgc

SEQ ID NO: 6748 - DNA, 235 bp, Homo sapiens; identical to SEQ ID NO: 6527
  misc_feature (1)..(235): n=a,t,g or c

SEQ ID NO: 6749 - DNA, 457 bp, Homo sapiens
  misc_feature (1)..(457): n=a,t,g or c
tttcccggcctgctggggtttatttgtctagctgggnagggtagggagggnccagtcccaacagcctgggccttgggacagggcgggggcagtgatggcccctggagccctactgggggtggtagatgtggtcttggtcttcctccggtcccaggagcacctggtgatttggcatcacccacaaccggggcctntcctcgccctgggtcctcctcaggcggagggtggtacaggctntcatggtcgggntcgggantcaggacacggcccagggtntcctcggtntccatccagggccttggtgctggaaaggaatgggggcccctgcctgaacctcgtggcttcttcctcggtggtcaaaantttcggctttcttggacaaaggaacaagcaacaacaacttggtcgtcctttttccggagcttncaacaaaaaggggcgcccaangctttttttt

SEQ ID NO: 6750 - DNA, 287 bp, Homo sapiens; identical to SEQ ID NO: 6530
  misc_feature (1)..(287): n=a,t,g or c

SEQ ID NO: 6751 - DNA, 444 bp, Homo sapiens; identical to SEQ ID NO: 6536
  misc_feature (1)..(444): n=a,t,g or c

SEQ ID NO: 6752 - DNA, 448 bp, Homo sapiens; identical to SEQ ID NO: 6538
  misc_feature (1)..(448): n=a,t,g or c

SEQ ID NO: 6753 - DNA, 415 bp, Homo sapiens; identical to SEQ ID NO: 6540
  misc_feature (1)..(415): n=a,t,g or c

SEQ ID NO: 6754 - DNA, 231 bp, Homo sapiens; identical to SEQ ID NO: 6543
  misc_feature (1)..(231): n=a,t,g or c

SEQ ID NO: 6755 - DNA, 320 bp, Homo sapiens; identical to SEQ ID NO: 2912
  misc_feature (1)..(320): n=a,t,g or c

SEQ ID NO: 6756 - DNA, 390 bp, Homo sapiens; identical to SEQ ID NO: 6548
  misc_feature (1)..(390): n=a,t,g or c

SEQ ID NO: 6757 - DNA, 456 bp, Homo sapiens; identical to SEQ ID NO: 5334
  misc_feature (1)..(456): n=a,t,g or c

SEQ ID NO: 6758 - DNA, 436 bp, Homo sapiens; identical to SEQ ID NO: 549
  misc_feature (1)..(436): n=a,t,g or c

SEQ ID NO: 6759 - DNA, 449 bp, Homo sapiens; identical to SEQ ID NO: 6168
  misc_feature (1)..(449): n=a,t,g or c

SEQ ID NO: 6760 - DNA, 410 bp, Homo sapiens; identical to SEQ ID NO: 6559
  misc_feature (1)..(410): n=a,t,g or c

SEQ ID NO: 6761 - DNA, 432 bp, Homo sapiens; identical to SEQ ID NO: 559
  misc_feature (1)..(432): n=a,t,g or c

SEQ ID NO: 6762 - DNA, 449 bp, Homo sapiens
  misc_feature (1)..(449): n=a,t,g or c
tttatgatttgtttcagttttattttcctgtctcagtttcagtaaaagattcagagaactgattgacacacatcataagctatcacccatataccctaaatatacactgtttatgctttttctttttcacggaacaaggtgacactatctttgttcaaaccaaagtgaaaaggaagagatacaataattttaaaaagaggggtgtgtgtggtctttcactctcagatagtgaatgtacgtcaccacaacaaggaaaaagcgctgaggaagaatgtgcatcccacaggtcagagagtcaagcaggaagtaccagtagagcacctccaaatatagcaaatttggaacaactaggcattactgtgaaagaacttcctagtttttcatttgtctgccaccacattgctacattggaatttaagccctcttcacagtgccaatatcaaaatgag

SEQ ID NO: 6763 - DNA, 139 bp, Homo sapiens; identical to SEQ ID NO: 6564
  misc_feature (1)..(139): n=a,t,g or c

SEQ ID NO: 6764 - DNA, 278 bp, Homo sapiens; identical to SEQ ID NO: 5737
  misc_feature (1)..(278): n=a,t,g or c

SEQ ID NO: 6765 - DNA, 275 bp, Homo sapiens; identical to SEQ ID NO: 580
  misc_feature (1)..(275): n=a,t,g or c

SEQ ID NO: 6766 - DNA, 293 bp, Homo sapiens
  misc_feature (1)..(293): n=a,t,g or c
ttttttttttttttaacatttaaaaatacttttagtaaaatactctgtaccctgtcaaaactcctttggcacacagtaaatcatagtgaagaacaaacatagcagaattgccttagttgaggctacagtgtaagagagaatacaacttagaaggtaataatagaaaaatcatagcattttccagcaattgatatgacagtaaatttataaagaaatacaataatttcccagtgactcttaactgttcaggatgccagtgctaaaccaggttgccatacataattccaagaaag

SEQ ID NO: 6767 - DNA, 389 bp, Homo sapiens
  misc_feature (1)..(389): n=a,t,g or c
ccttttaaatgcttcttttatttcattggttgtacattgggtgagtgaactgaatattacaaccaaaacatagtattgatacaaattagactcctgtttacactgtaaggtaatgaatgagggaattctttaagtgttacagaaagatttagtagaaatgttaccagtggtatggctgaaagaatatttcggtgaagtgctgttatatcctgaaaaccaagagtgaaatgtagttcccatacaagtggagagttagtctcttaactacagtatttgttgaactgatatcttcatgtcttggatattggtgatttttgttttttaattaaacaaagcatttaagatttattcatcatagtcagacttctgaatataaacaaacttttggc

SEQ ID NO: 6768 - DNA, 252 bp, Homo sapiens
  misc_feature (1)..(252): n=a,t,g or c
agccaagcacgttagatttnctagggtcatgtctgcaggtgaggtaacagcacacacatacagaaattcacgggcagagatgccaccgcagcatcaccgtcagacaccaaagcagcaggagggctcaggaagtggctttggaaagttctcgtgaaaatcaaagggcagctttggtgctcagagattcaaacagaaaactntacaaaaccaacccataaatatatatatatatataatatgtgtatatatata

SEQ ID NO: 6769 - DNA, 377 bp, Homo sapiens
  misc_feature (1)..(377): n=a,t,g or c
tttaaagatctaattggcttttattagcgattcatgaactgggtagcatccagcctacaaaataaaacagaagccctgccaggtatgatagaatggtctgcatttgtaaagcagcactagcaggaacaaggaaacagcatagtagacacagcagattggttaacatcaggttacttcaggttacgttccttgtgtggattaaagcagagggggcttcctcatcataatcacgcttgctcacgttgactggactccctttgatcagttgctgtgaatctcctgacttgttgaaactgtcctatttttaagttcactttgattacatggactccattcctggatggagaggtgagatcttggagttccattcaacataa

SEQ ID NO: 6770 - DNA, 526 bp, Homo sapiens
  misc_feature (1)..(526): n=a,t,g or c
tttttttttttttttttttttttttccttttcttcagagtttattttgaattttcatttttggataaccaagcagctctttaagaagaatgcacagaagagtcattctggcacttttggatagtacataagattttcttttttttttttaaattttttttaatagtcacattcagctcgcttgctcaaaccagactcccacattgggtgagcaagatgagcccataggattccagagttaatacgtaaccgtatatacaaacagccaaaaaaccataatggtgccacagggatggagcagggaagggcatctctaacgtgtcctctagtctatcttcgctaaacagaacccacgttacacatgataactagagagcacactgtgttgaaacgaggatgctgaccccaaatggcacttggcagcatgcagtttaaagcaaaagagacatcctttaataactgtataaaatccaggcagttccattaaaggggttaagaaaaccaacaacaacaaaaagcgagggact

SEQ ID NO: 6771 - DNA, 361 bp, Homo sapiens
  misc_feature (1)..(361): n=a,t,g or c
tttttttaactccccaaatttttatttttccatttttatcaccacaaatttcttggtaacaatgtagaatttaattttgtaattaaaacaaaaactctcccctaggaggaatctgatgacataaggataacaccaagttatgtgcacaaacgacaaaaaatgccaaactaactggaatgatcatccttcctgaaatttctcttaaaaagcagagaagtagaaccaatgctgccacctagtgcgcagccaaacaaatcaggtagcatactggagaaaaaggtcatagtcccgacaatctggtttccctgcctattatcaagccacctaactcctcacttttccacaaaaaaacacaaccaca

SEQ ID NO: 6772 - DNA, 265 bp, Homo sapiens
  misc_feature (1)..(265): n=a,t,g or c
tttaaaaagtgaaacaccaatagtttaattgaaatttcagaaaattgaacatatgaacaaggcaaataaatactaagtaagttaaaaacacaaaatatgtccaggaagtatcgatgagaatgttcaagttaaagttctccaatgccattgctacagcaacctcaaaccctaggttctctctgcaccattaacacagacatctcaggacatggtttgcttttttttaagacttaaataggaaactaatttttctttctttaaagca

SEQ ID NO: 6773 - DNA, 271 bp, Homo sapiens; identical to SEQ ID NO: 6565
  misc_feature (1)..(271): n=a,t,g or c

SEQ ID NO: 6774 - DNA, 310 bp, Homo sapiens; identical to SEQ ID NO: 6232
  misc_feature (1)..(310): n=a,t,g or c

SEQ ID NO: 6775 - DNA, 194 bp, Homo sapiens; identical to SEQ ID NO: 6566
  misc_feature (1)..(194): n=a,t,g or c

SEQ ID NO: 6776 - DNA, 371 bp, Homo sapiens
tgttggccaggctggtcttgagctcctgacctcaagtgatccgcccgccttggcctcccaaaatgctgggattacaggcatgagccaccatgcctggccaacaccaacctttagttacttgctgaatacacaggattaaggaggaagagaaagtatcaaggatgactcccaggttcctagcttggtggtcccagtaattgagagagagaatgcagcaggaagagcagctctagggggaacaggatgagtatctccacatgatgggttggaggtacctgtgagtcacatccaggtggatgtgtcctgtgggcagtgggacgcgatctgaagctcaggcaagaggctagagttacatctttggagtcatcagc

SEQ ID NO: 6777 - DNA, 472 bp, Homo sapiens; identical to SEQ ID NO: 6252
  misc_feature (1)..(472): n=a,t,g or c

SEQ ID NO: 6778 - DNA, 454 bp, Homo sapiens
  misc_feature (1)..(454): n=a,t,g or c
taacatgtttctttggaaaaatggcaatattgagtggaagagaagctgtccttttagacacccagcttattggcctgggtgagaacaactttgagaactggcatgaaagcagaggtctcactgaagttgctggtgctaactatgtgggtatgcatggtcaatccttctgagtagtttcgagtttcaatgctccttgcaatgttgtgtaaaccactggtgattgttggtgaaagtgtctgttccctaagtttatcatacagaaactccaaacgtttgctggcatcatctagcttcctcttggtttgagggtctgttgctgaagaaaggcagcgctgaataagatcctcaaatgtggtctttagaatgaggtgctcatctggaataggtttcttggtaattttttttgttggcaagactgcacatgctggaaggtatttccaataggagcccctgg

SEQ ID NO: 6779 - DNA, 212 bp, Homo sapiens; identical to SEQ ID NO: 6567
  misc_feature (1)..(212): n=a,t,g or c

SEQ ID NO: 6780 - DNA, 276 bp, Homo sapiens
  misc_feature (1)..(276): n=a,t,g or c
ttttttttttttttggcgacatagtattttattttcctagaattatgtccagctgtgagaaagccaggttcaaatttaaatcctttaataacctgtcccagaattactaacaatgagacttaaacaaattttgatttgtgaagaaaacatgaaaaaagtccaaaagaaaccccctcaaagggcccgagtgtcaacagttcccctttggagcagctcatccatctctcaggtgggggtcctccggcaggcagcttcctctgtggcgccaggtgggtc

SEQ ID NO: 6781 - DNA, 336 bp, Homo sapiens
  misc_feature (1)..(336): n=a,t,g or c
gtcaaaagcaatttaatttttggaggaaaaactgcatacgcatacaacttatatctcaggcgaaatgtctcagaatcttcctgctcattggacagaaactcagcttcaccacattgccagccgggagaccatggaagggaactggcgccactgcccccagctgcccttcccaggggcaacttcaccaagatgcggaaatcctgggcccaccccacagtcagtcatcgctccatttcttcctggcaccaccacctccatctggcctgctccccaaccccccagaaagcaggtggggccaggcttcaagggcagtggccccatcaagattcagacgta

SEQ ID NO: 6782 - DNA, 459 bp, Homo sapiens
  misc_feature (1)..(459): n=a,t,g or c
tacatatatagatctataatatgtataatctccataaaacatatattaaggcatgtaaagcaacataaagagccagctttatgaaataagagatgngananaggtggcagaggcgcagacattatttcttggtattttacatgtatttctaaaaaatattactttaaaaaaaaaaaaaagagacggacaaagtggcaggcatggaaggccctgaaaaatctgtttcctgtggagggagaaaggcttgggagaaagagagagagaggaaatgacctgggagccaatcccacctgccagtctgcaggggagaaagggcaggtttggggtgcttgaactgtgaagatgggaaatacagccaagggtcacgtttaaaaaacctgctagaagtgaagatcggtggaatcctcccaggctgtaatcccncagaaacatgngaatatcctaagcacctacaacagt

SEQ ID NO: 6783 - DNA, 434 bp, Homo sapiens
gctctttgagaaagtttattggcaccaggaagggtgttgggagctggcaactacaactggtgagcaaccgggcaggcaaaattattcctagagcttcagcaagttctctcagcagttatggacaaagctggtcccagcttacagcacgcagtttcaccagctggatgtgcagagaattacattactagattaatgttatgtgcctgaggtgcttttatccctggcttcttgacttttgattgggtgtgataagaatgacttaatttggtgtaatccactttcacagcactgagcatacttagtatgtactgagggttgctcgaattaacggtgtgtaccgcaccccaggaaggcttaatgaagtaggattactgcttaagctaagacctttattaaaattttgtcctctggccagtcgtggtggctcatgccta

SEQ ID NO: 6784 - DNA, 458 bp, Homo sapiens; identical to SEQ ID NO: 5218
  misc_feature (1)..(458): n=a,t,g or c

SEQ ID NO: 6785 - DNA, 493 bp, Homo sapiens
  misc_feature (1)..(493): n=a,t,g or c
aatttacaaagtttaatttccagaaattaatttgtgaattagatagctgaagctggatcattttcccttaatactggttaacacatacaatagaaagtagtatacagagaaagtatgtatgcaatactattagccaaacaaaatacacagaacaagaaattttattatctccaatgctggtgcatgacaaataacaagcttaattagaggaggagacagagggaaacttcagataccaaggtaatttctgggcaggtttaaaacctttaaaagttgntaggaataactggttccataaagtcctttttaagatatagcgctttttacttggacaacttttattaacagttccttaccaatatggaagttcaactaaaagtccttcatctgtcaagttaaaaacagccaagcaaaaccaaatttctctaggtatataacagcataagccaatgggtttggttttcnttggtacattcacacacattttaagtgt

SEQ ID NO: 6786 - DNA, 219 bp, Homo sapiens
  misc_feature (1)..(219): n=a,t,g or c
tgcaaaacaaagaaaaatattttattgtaacttaaaattcatcccctagacaacagataacgcccacattggatgttatttagcagacatagtgaagatgcctttggacaattatcagcattgatgaatatgaagatgtcacatcaaagtcaaactttttcaggttattgggtttcctgaacataactggcaaaaaggaactttcaacacaacnagtag

SEQ ID NO: 6787 - DNA, 347 bp, Homo sapiens
  misc_feature (1)..(347): n=a,t,g or c
tatttgcctttcctttttaatcctcttcttactccaactctttaaaaaaaaactgcccagaaaacccagtaattaagcaaaagggagctcaaagancaaggcaagccagcccaagagtagcagggtccctcccgcaggcnnaaagtctggatgctggggtctccactcagagcctggtagtaaaagctggtgcagaataaggtcgttccggaagctagcaataacccagcccagagtggctttctgcaatggggcacccctaacagggccaggctgtgtaagaagtggtgtttgttggccttgtcaaacagctccttcncgtatgcatctnggaanattggggccgt

SEQ ID NO: 6788 - DNA, 241 bp, Homo sapiens
  misc_feature (1)..(241): n=a,t,g or c
taaaaggtaaatcatttttattgccacaaattgataaattgttgtgaaaaaaagagaaactggcacacatgaaataacacaaacataagaagatataagaccaaaatagatttgaattatgtctcccaggctggattgcagtggggcgatctcagctcactgcaacctctgcctcccaggttcaagcaattctcatgcctcagcctccaagtagctgggattacaggcatgcaccaccatg

SEQ ID NO: 6789 - DNA, 409 bp, Homo sapiens; identical to SEQ ID NO: 744
  misc_feature (1)..(409): n=a,t,g or c

SEQ ID NO: 6790 - DNA, 164 bp, Homo sapiens; identical to SEQ ID NO: 5364
  misc_feature (1)..(164): n=a,t,g or c

SEQ ID NO: 6791 - DNA, 399 bp, Homo sapiens
  misc_feature (1)..(399): n=a,t,g or c
ttttttttttttttttttgaactttagaaggtttattgttgatagagctgtagtgattctgaaacttgtatttatggtagcactgagcaaatgagtgaaatatattgagaataatgggagccagggttattactgctgtggtaagagagacaatacagaatgggggaaggcaaagaagcacccatggtnttggattaaaagtttcagtatgaactcatgatttaaaagtatgataaatatgtattcatatatacatgtgtcccacatatatatacacacacttatttgccataaattttcctagttctgtctgctgaaatgcctcaaaggcantgatatccagtntcagtgtgantacctngtgccaattttaggcttctaaatggacatacctactaa

SEQ ID NO: 6792 - DNA, 364 bp, Homo sapiens; identical to SEQ ID NO: 484
  misc_feature (1)..(364): n=a,t,g or c

SEQ ID NO: 6793 - DNA, 282 bp, Homo sapiens
  misc_feature (1)..(282): n=a,t,g or c
cccaaaaatacttccatttaatatagtcatatgaaagctaatcagcaagaagggagattgacagacatgcttaggaaaatagctacgtaccataccaccacaccaaagtgttgttttttgtttttgttttttttttaaacaaatggagaaaagacagaccagccaggatgacttcccacagggaagggatttaagggctgcccccatgaatttcttcaggccacggcagctacttcctcctcttgtatctggatttagatttaaagtttcctcctcgtctct

SEQ ID NO: 6794 - DNA, 307 bp, Homo sapiens; identical to SEQ ID NO: 6569
  misc_feature (1)..(307): n=a,t,g or c

SEQ ID NO: 6795 - DNA, 257 bp, Homo sapiens
  misc_feature (1)..(257): n=a,t,g or c
ttttttttttttttttcagtgatttctgcagttttttattctagccaggntctaggngctggcctggaactataaaacaaacatttcacaaaaagttatgacaatatacaaaggaaagacaatttctttgaatatccataatctcaatatgcagtctggctgtggatggccaagagatagtttccttaactggaaaaagcttttaaatgaggcttggtggaagatatatctttgcatcattacaaagaagaaaaaag

SEQ ID NO: 6796 - DNA, 468 bp, Homo sapiens; identical to SEQ ID NO: 808
  misc_feature (1)..(468): n=a,t,g or c

SEQ ID NO: 6797 - DNA, 172 bp, Homo sapiens
  misc_feature (1)..(172): n=a,t,g or c
tgaaaataaagcacatttattaaggcaaaggccaagctggcgcntcagaacatggccaaggagcgtgaagggattgctccactttaccaccactcagggcacccaggccccaggggtcctgggtccacccccccaggccagcagaagctatgaagcttacgcataagcctgg

SEQ ID NO: 6798 - DNA, 454 bp, Homo sapiens
  misc_feature (1)..(454): n=a,t,g or c
gagccggaagtctcgggtgtcatttattgacagcagttnatacacatttgtttccttcccagtgcaggcatagagcccgtgagaagggcagtctctgaacnatgnggccaggaacgtaggtcggacacatctttggcaggcatgttcagccccagcaggatggaatccttcaagttngaattccactgggtatctcgaganggaccaaggtggggggtagagaggaagtcttcaacagggactcacatctcggtccaaggcctcctctctcactatacaaggtccatccaagttttaggaccctggggggaacaagtcatggcccacccacctcaacanggggcagattcttcaatctgtgcccagtttcacacacaccttgtttccgctggttcacacagttaaagangaatcagacttattggtaacagacagaccactttcctctctgccc

SEQ ID NO: 6799 - DNA, 346 bp, Homo sapiens; identical to SEQ ID NO: 5804
  misc_feature (1)..(346): n=a,t,g or c

SEQ ID NO: 6800 - DNA, 565 bp, Homo sapiens; identical to SEQ ID NO: 5808
  misc_feature (1)..(565): n=a,t,g or c

SEQ ID NO: 6801 - DNA, 327 bp, Homo sapiens; identical to SEQ ID NO: 5958
  misc_feature (1)..(327): n=a,t,g or c

SEQ ID NO: 6802 - DNA, 432 bp, Homo sapiens
  misc_feature (1)..(432): n=a,t,g or c
tttaagcatatgagtgtttaatactggaaaagagataatggcatatgtcagtctcacgtctctttcgcagcgagcaatgaaatgggtgactgtggaggcagattctccctagcacatcttctccgtctgttcagttcacacgcagcagccagttctgcgggggcataggcagctatgggtttggtcctgagccctgcgatgctggctgggcggggggctgtgtggtgccctgtggctgggtggtggcagggggggagccagtctgcagctgggcctgaaactgggcaagctgctcaggactggccagtgtcttcagcagattgttctcctgctccagctgggaatttttctctattagttctttgatttgctctttgaggacctccacttcttctctgaccgcatacatcaaatggcttttcaccctcgtgc

SEQ ID NO: 6803 - DNA, 281 bp, Homo sapiens; identical to SEQ ID NO: 606
  misc_feature (1)..(281): n=a,t,g or c

SEQ ID NO: 6804 - DNA, 440 bp, Homo sapiens
  misc_feature (1)..(440): n=a,t,g or c
gcaggagaatggcttgaacccgggaggcggaggttacagtgagccaagatcataccactgcactccagcctgggtgacagagcgagactccgtctttaaaaaaacaaaacaaaacaaaacaaaaaacaacaaactcatctttactgaaccatttcataagctctactttatttgtctagttggatttcatttcttctggaaaatttattgtttattggcatgtgacccttgactgatggcttcattagcattttgtttttctttttggatccttaatagaaaactcaattctgttagggatttccaaataggatagggcaaagtcgcacttagtatatcctccacagaaagaaagaagcaaaatcaagccaagagggccctttacttgtcctcttgctaagttaataaatagactggtggatggtggtagatggagaaac

SEQ ID NO: 6805 - DNA, 354 bp, Homo sapiens
  misc_feature (1)..(354): n=a,t,g or c
tttttttttttggggggtcctgagatctttatttctggatgttgctgtgtgttgggtataagatccagaacttgctaccagcctgaggagaaatcaaacacatggagaaaggaaagctgacagcccagagacccacggggaaacaggccccgagttactggatacaggcaaccctaaaactgactgtccctctggactctacgtagtgagccaacacatttcctcattattttggatatgtttttttcagttgaaggcattctgattcaatacaggtgaaacttttctttgcaaattacaaagtgtgataactgttgctaaagtttggaatgtgcttagagggagatcatgaac

SEQ ID NO: 6806 - DNA, 509 bp, Homo sapiens; identical to SEQ ID NO: 6574
  misc_feature (1)..(509): n=a,t,g or c

SEQ ID NO: 6807 - DNA, 253 bp, Homo sapiens
  misc_feature (1)..(253): n=a,t,g or c
tttttttgaggattgaaaaattatctttattatcttgagtgggagctggagctggaagtctccacgttctccctccaacaactcagctcccattgtacccatctggggacttagatgaagttacaggtcagttattggacagctcacaggcctcttgattcctaggagtcaataagaaggctttggagtccaggcaggaagtcagggacttgaattcctccacacacttttcgggaggatgtggtgagcgatt

SEQ ID NO: 6808 - DNA, 387 bp, Homo sapiens; identical to SEQ ID NO: 632
  misc_feature (1)..(387): n=a,t,g or c

SEQ ID NO: 6809 - DNA, 271 bp, Homo sapiens; identical to SEQ ID NO: 636
  misc_feature (1)..(271): n=a,t,g or c

SEQ ID NO: 6810 - DNA, 468 bp, Homo sapiens; identical to SEQ ID NO: 6576
  misc_feature (1)..(468): n=a,t,g or c

SEQ ID NO: 6811 - DNA, 432 bp, Homo sapiens
  misc_feature (1)..(432): n=a,t,g or c
canatttttatgtttcaataactgatttattttttaccccttgtacttaagatttaacatgtgttgtatttccagcagttcaaatctaattgtgtcgaatttccaggattggaggaaaagttgctccctttcagccctcctactagaagcactggagctaggctggcgggcattggaccctagtaggtatagcaggctgtgaagagcgactgggtggaagcagccccagaagaacccgtgtgaacatactgtcctttggccgcctggcaggttagccatggcccggcttcataaaagcctcctgggttgcctccttgtttggcagccttgccaccccaggnagccagnggcactggncttggnagggcccggtccataaggggaaacctnagttttccaggggctttgggttanaaggggnaaagggtggtt

SEQ ID NO: 6812 - DNA, 309 bp, Homo sapiens; identical to SEQ ID NO: 683
  misc_feature (1)..(309): n=a,t,g or c

SEQ ID NO: 6813 - DNA, 375 bp, Homo sapiens; identical to SEQ ID NO: 728
  misc_feature (1)..(375): n=a,t,g or c

SEQ ID NO: 6814 - DNA, 424 bp, Homo sapiens
  misc_feature (1)..(424): n=a,t,g or c
atcatcattcatttatccttttatttagtggcttagatcctagaagatagattccctataaaatcattttagccacgaaatattcataagaaaccaacttcaaatgttaatgaggatactgaagttttttttaacctaaaaaaagtggcaattttaggtaaccataaagctgaggcaaaggcagtttgggttcttggaaagaatcctgcctaccatcttcagtggcctctggnacaaagcacttatgatcactgcagaggtggagcaaggtaaaggactgtgtcagcagttcatgttgtgacagcagcagcatctgcagaaaacgcaggtcatataccttggcttacacaaggaatgctattgaaaaatgagccaccaggtgggagcttttaacataggtaatgattagtgaaagcctcttagt

SEQ ID NO: 6815 - DNA, 333 bp, Homo sapiens; identical to SEQ ID NO: 4596
  misc_feature (1)..(333): n=a,t,g or c

SEQ ID NO: 6816 - DNA, 470 bp, Homo sapiens; identical to SEQ ID NO: 6578
  misc_feature (1)..(470): n=a,t,g or c

SEQ ID NO: 6817 - DNA, 453 bp, Homo sapiens
  misc_feature (1)..(453): n=a,t,g or c
ctgttaccctctccttttcactctctctcattccgttccctttcttctttcaacatctaacatggtaaagttttgtgctaataaccaaggcaagacaaaacttatattcatgttcttccataaagaatctcatatcatcataggaaggccaaggccagaagggaaaagaaagagaaagaagaggggaatccaaatgaatgtctcttagatgtctcactgcgcacgggcttttccggacatcttccactccttgtctcgaagcttggctcgttgaattttccctgtgacagtcttggggcaggttcaaggacaaactctatctttcttggggtacttgtatgggggctgtcactgactttcacatgctgctgcagctccttgggtgagctgtttctggggtcatgggggacagggaactncgaggccaggggnccacaaatgcctttcaccacc

SEQ ID NO: 6818 - DNA, 408 bp, Homo sapiens; identical to SEQ ID NO: 3513
  misc_feature (1)..(408): n=a,t,g or c

SEQ ID NO: 6819 - DNA, 5654 bp, Homo sapiens; identical to SEQ ID NO: 644
  misc_feature (1)..(5654): n=a,t,g or c

SEQ ID NO: 6820 - DNA, 5423 bp, Homo sapiens
  misc_feature (1)..(5423): n=a,t,g or c
agatggcggtcttggcacctctaattgctctcgtgtattcggtgccgcgactttcacgatggctcgcccaaccttactaccttctgtcggccctgctctctgctgccttcctactcgtgaggaaactgccgccgctctgccacggtctgcccacccaacgcgaagacggtaacccgtgtgactttgactggagagaagtggagatcctgatgtttctcagtgccattgtgatgatgaagaaccgcagatccactctctccttcctgcttcctccttgctgtggtggctgggatgcttcttccatgattttttgaatctagactgggctgttctctgtgttaaaccaatcagttgcgaccttctcttaacagtgtgaagtgagggggtctctctccctccttctccttcctctgtgattcaccttcctttttaccctgccctgcggcggctccgccccttaccttcatggacgactcagaggtggagtcgaccgccagcatcttggcctctgtgaaggaacaagaggcccagtttgagaagctgacccgggcgctggaggaggaacggcgccacgtctcggcgcagctggaacgcgtccgggtctcaccacaagatgccaacccactcatggccaacggcacactcacccgccggcatcagaacggccggtttgtgggcgatgctgaccttgaaagacagaaattttcagatttgaaactcaacggaccccaggatcacagtcaccttctatatagcaccatccccaggatgcaggagccggggcagattgtggagacctacacggaggaggatcctgagggagccatgtctgtagtctctgtggagacctcagatgatgggaccactcggcgcacagagaccacggtcaagaaagtagtgaagactgtgacaacacggacagtacagccagtcgctatgggaccagacgggttgcctgtggatgcttcatcagtttctaacaactatatccagactttgggtcgtgatttccgcaagaatggcaatgggggacctggtccctatgtggggcaagctggcactgctacccttcctaggaacttccactaccctcctgatggttatagtcgccactatgaagatggttatccaggtggcagtgataactatggcagtctgtcccgggtgacccgcattgaggagcggtataggcccagcatggaaggctaccgggcacctagtagacaggatgtgtatgggccccaaccccaggttcgggtaggtgggagcagcgtggatctgcatcgctttcatccagagccttatgggctagaggatgaccagcgtagtatgggctatgatgacctggattatggtatgatgtctgattatggcactgcccgtcggactgggacaccctctgaccctcgtcggcgcctcatgagctatgaagacatgattggtgaggaggtgccatcggatcaatactactgggctcctttggcccagcatgagcgaggaagtttagcaagcttggatagcctgcgcaaaggagggcctccacctcctaattggagacagccagagctgccagaggtgatcgccatgcttggattccgcttggatgctgtcaagtccaatgcagctgcatacctgcaacacttatgctaccgcaatgacaaggtgaagactgacgtgcggaagctcaagggcatcccagtactggtgggattgttagaccatcccaaaaaggaagtgcaccttggagcctgtggagctctcaagaatatctcttttggacgtgaccaggataacaagattgccataaaaaactgtgatggtgtgcctgcccttgtgcgattgcttcgaaaggctcgtgatatggaccttactgaagttattaccggaaccctgtggaatctttcatcccatgactcaatcaaaatggagattgtggaccatgcactgcatgccttgacagatgaagtgatcattcctcattctggttgggagcgggaacctaatgaagactgtaagccacgccatattgagtgggaatcggtgctcaccaacacagctggctgccttaggaatgtaagctcagagaggagtgaagctcgccggaaacttcgggaatgtgatggtttagttgatgccctcattttcattgttcaggctgagattgggcagaaggattcagacagcaagcttgtagagaactgtgtttgccttcttcggaacttatcatatcaagttcaccgggagatcccacaggcagagcgttaccaagaggcagctcccaatgttgccaacaatactgggccacatgctgccagttgctttggggccaagaagggcaaagatgagtggttctccagagggaaaaaacctatagaggatccagcaaacgatacagtggatttccctaaaagaacgagtccagctcgaggctatgagctcttatttcagccagaggtggttcggatatacatctcacttcttaaggagagcaagactcctgccatcctagaagcctcagctggagctatccagaacttgtgtgctgggcgctggacgtatggtcgatacatccgctctgctctgcgtcaagagaaggctctttctgccatagctgacctcctgactaatgaacatgaacgggtggtgaaagctgcatctggagcactgagaaacctggctgtggatgctcgcaacaaagaattaattggtaaacatgctattcctaacttggtaaagaatctgccaggaggacagcagaactcctcttggaatttctctgaggacactgtcatctctattttgaacactatcaacgaggttatcgctgagaacttggaggctgccaaaaagcttcgagagacacagggtattgagaagctggtgttgatcaacaaatcagggaaccgctcagaaaaagaagttcgagcagcagcacttgtattacagacaatctggggatataaggaactgcggaagccactggaaaaagaaggatggaagaaatcagactttcaggtgaatctaaacaatgcttcccgaagccagagcagtcattcatatgatgatagtactctccctctcattgaccggaaccaaaaatcagataagaaacctgatcgggaagaaattcagatgagcaatatgggatcaaacacaaaatcactagataacaactattccacaccaaatgagagaggagaccacaatagaacactggatcgatcgggggatctaggcgacatggagccattgaagggaacaacacccttgatgcagaagatttagcaccactatctccgttccatctgggcttatatgtacttttattttttggtggtgaaattgactgatgattttcctttttcttcgctggactattgtgccaactgccaggctgcctcctgcccttacagccctaagtggctgccttctttccatcaactcccaacttcttcctgtgaagtttaattgtctcaacgcctccccctcccccattccctccatttttctcccaagaaacctgactcaattatttgcatattttgagaaactgctgcagattagttctttttgccagttttccctggaactcctggccttttgtggaggggagggatggagagaataggaatcttcactagaagccgtgggaagaattggaagttacatgctgtatatgcaatgtccagcagtctgataaactgacgattcttaatcaagatttttttcctgatggggaagggacttttattttcttttagagaggggaaagtgtgagctcttcccttattcctaatggctatttttgaagcaaagaaggccagcaacattggcacatgccacctggcaaaggacccttgagtaagtgaaggtctcctaaaactgggattaagaaaccttgctctcctcatctccaaggcagggaccatcaagaacctacagactccatctcttctgcaagcctcatgccaaccctgggctattgctgctgccccttaaacacaggctgtccttaacccacctctcctgccctgtgatatgtctgctgagttggcctggccatttccaagaggctgtagaaaggggagaatgtcaaggaagacttttggtagagaaggagcagaaagatgtgtttttgggaagaagaagacctctaggaggagctagtaggaatgtacatgaagcaattagtctgaaactggcttccccactcccccgtttctccttttcctatccttataggcctgtcccttgcctctgccctggattggttggcaaactaaaggacttgatgtacataactcctgtcccttttcccttacaaggtggggattgcccctggctttgcctcttctttgtgcctttggcctggggtgcatctcctcccgcccttccatgtgcctttctttgcctctgcagtctcatttctcataattttgcaaattatattttgttgctttcttacctactattggccctaaatagcagaaagaagagaagtgaccgagagaacctcagattcttcattgaggattggtatagccatgatttcagtcatagcaagcttttgctcaacagcatatgggtgggattttgcaaaaatcctattctgatgaatctcaaagtaaggctggtaagagaagtgagtggtgtgactcttactccttaggtgcccagaatttaccatcatctctgaaggagttacagggaagtggtctccccaattctcccctccctccagtattgccccctctcactttagcatatattaattagcaggttgggctagagaaatcagctgctatgcgggttgattattattattatttctaatccttttccttatttgccttctactccccttaatctaatctaaaagctctgttccatgcaactggagttccttatccctctcttccccttcccttatatattgaggctatggggtaggagaaaagtgcacaacccaccaccccctttactcgtgcattaaaatttcttatttacccttttcccccttcccatttcttcccactttcatctaccttttctggcaaaaaggagccttttgctctctgtgaccctaagagcacactgcacagggaaaattgccccatccagacctggctccactcttgatctctcttgtcctcttctgctcttttcctggtgctcttttttctcggtggggtgtgggtaatagaacagccgtgggcttttggggacctttaacttttttttctctcttttgtttataaaaaacactaaacattcaattccagagaaccaaaaatcccaccttcccaccgaacactactaaggggcttgtgttctgctccataccttttctcttttctttctgtcttgttaatgcttttaaaaacaaatgagttttttatataaataaagtttttaaagtgtgt

SEQ ID NO: 6821 - DNA, 55795 bp, Homo sapiens; identical to SEQ ID NO: 6579
  misc_feature (1)..(55795): n=a,t,g or c

SEQ ID NO: 6822 - DNA, 1996 bp, Homo sapiens
  misc_feature (1)..(1996): n=a,t,g or c
atggcggcgatggcggtcgggggtgctggtgggagccgcgtgtccagcgggagggacctgaattgcgtccccgaaatagctgacacactaggggctgtggccaagcaggggtttgatttcctctgcatgcctgtcttccatccgcgtttcaagagggagttcattcaggaacctgctaagaatcggcccggtccccagacacgatcagacctactgctgtcaggaagggactggaatacgctaattgtgggaaagctttctccatggattcgtccagactcaaaagtggagaaaattcgcaggaactccgaggcggccatgttacaggagctgaattttggtgcatatttgggtcttccagctttcctgctgccccttaatcaggaagataacaccaacctggccagagttttgaccaaccacatccacactggccatcactcttccatgttctggatgcgggtacccttggtggcaccagaggacctgagagatgatataattgagaatgcaccaactacacacacagaggagtacagtggggaggagaaaacgtggatgtggtggcacaacttccggactttgtgtgactatagtaagaggattgcagtggctcttgaaattggggctgacctcccatctaatcatgtcattgatcgctggcttggggagcccatcaaagcagccattctccccactagcattttcctgaccaataagaagggatttcctgttcttttcaagatgcaccagaggctcatcttccggctcctcaagttggaggtgcagttcatcatcacaggcaccaaccaccactcagagaaggagttctgctcctacctccaatacctggaatacttaagccagaaccgtcctccacctaatgcctatgaactctttgccaagggctatgaagactatctgcagtccccgcttcagccactgatggacaatctggaatctcagacatatgaagtgtttgaaaaggaccccatcaaatactctcagtaccagcaggccatctataaatgtctgctagaccgagtaccagaagaggagaaggataccaatgtccaggtactgatggtgctgggagcaggacggggacccctggtgaacgcttccctgcgggcagccaagcaggccgaccggcggataaagctgtatgctgtggagaaaaacccaaatgccgtggtgacgctagagaactggcagtttgaagaatggggaagccaagtgaccgtagtctcatcagacatgagggaatgggtggctccagagaaagcagacatcattgtcagtgagcttctgggctcatttgctgacaatgaattgtcgcctgagtgcctggatggagcccagcacttcctaaaagatgatggtgtgagcatccccggggagtacacttcctttctggctcccatctcttcctccaagctgtacaatgaggtccgagcctgtagggagaaggaccgtgaccctgaggcccagtttgagatgccttatgtggtacggctgcacaacttccaccagctctctgcaccccagccctgtttcaccttcagccatcccaacagagatcctatgattgacaacaaccgctattgcaccttggaatttcctgtggaggtgaacacagtactacatggctttgcggtctactttgagactgtgctttatcaggacatcactctgagtatccgtccagagactcactctcctgggatgttctcatggtttcccatcctcttccctattaagcagcccataacggtacgtgaaggccaaaccatctgtgtgcgtttctggcgatgcagcaattccaagaaggtgtggtatgagtgggctgtgacagcaccagtctgttctgctattcataaccccacaggccgctcatataccattggcctctagccctgcgtgccaagtgtccagagccttggaagcagcttcaggttctgctcctgtagtacagaaggtgcagtacatctatggg

SEQ ID NO: 6823 - DNA, 1192 bp, Homo sapiens
  misc_feature (1)..(1192): n=a,t,g or c
ggctccctccggccgcgaactgcccctccccgccccgcctcccggcgcgggtggccgaggcgtagcgccgcgacccccgcacccctgcgaacatggcgctgcgagtggtgcggagcgtgcgggccctgctctgcaccctgcgcgcggtcccgttacccgccgcgccctgcccgccgaggccctggcagctgggggtgggcgccgtccgtacgctgcgcactggacccgctctgctctcggtgcgtaaattcacagagaaacacgaatgggtaacaacagaaaatggcattggaacagtgggaatcagcaattttgcacaggaagcgttgggagatgttgtttattgtagtctccctgaagttgggacaaaattgaacaaacaagatgagtttggtgctttggaaagtgtgaaagctgctagtgaactatattctcctttatcaggagaagtaactgaaattaatgaagctcttgcagaaaatccaggacttgtaaacaaatcttgttatgaagatggttggctgatcaagatgacactgagtaacccttcagaactagatgaacttatgagtgaagaagcatatgagaaatacataaaatctattgaggagtgaaaatggaactcctaaataaactagtatgaaataacgaagccagcagagttgtcttaaattagtggtggatagagacttagaatagaaacttttagtattaccgatggggcaaaaaaaaactactgttaacactgctaatgaaagaaaatgccctttaactttgtaatgattatagataaatataatatgcgtctttttcacaatatcctatgatttttagactaggctctagtgttcagaattcatgaaattatccatggtaaaaactagttataaaaattacataattcaaagataacattgttattcttaagccttatataatattgtaacttgcatgtatccatacctggatttgggatgaaatacttaatgatctttccattggaaataactggaagtgaagaggttttgttgcttgtacagtgtcagatgaggaacaccactatcttaattttgcgatacactgcatttgctggtgctatttttatacagtgaagcaacagctttgcagcaaaataataaaatacttcttcgttaaaaaaaaaaaaaaaaaaaaaaaaaaaaaaaaaaaaaaa

SEQ ID NO: 6824 - DNA, 1311 bp, Homo sapiens; identical to SEQ ID NO: 5535
  misc_feature (1)..(1311): n=a,t,g or c

SEQ ID NO: 6825 - DNA, 1875 bp, Homo sapiens; identical to SEQ ID NO: 6580
  misc_feature (1)..(1875): n=a,t,g or c

SEQ ID NO: 6826 - DNA, 792 bp, Homo sapiens
  misc_feature (1)..(792): n=a,t,g or c
ggagttgcgcgggctgacgcgccactatgtagcgggtttcgggcgggccacgcgtgcgggacaggaacccaaccccagccgaccttgagctccaggagttcgtctcttacgtctgcggaagtgcagctgcctcagttcttagcgcaggttgacaactacaggcacaagccattgaagctggaatgtcctgttgctggtatttcaattgacttaagccaactatcccttcagttacaataggaaagtgcctctaataaggccaaatatgcgtactaacttgtagcaaccacgtgtccgtgcagtgccacaggagctagagcagtgacaatgctggtggcaacagggcagtgtagcaggtgcttcatgttcaccttttcaaccttttcatttaattgtcacaactcggaggtggattctgttagggacaggctgccccaggaccactccgcccccgctaactcaatgcagctgacccttaccctgaatactctgcagctgcattcctgaaccgttatctaggcgctatagcaaggtcaccagacttgctacaccgaagccctctgggtggcacgggggaggtcatgagaaacgtggattacacccccttgtaaattcctattttcacaagataatatattgtaagccggtcatgagattatatgtggtaaagttaattgactaacaaccccagggtctctctcccccatataaacccctcattttgtaagctcagggctgccacctccgactggtggagaagcctggcaggttaataaacttacttggcctgac

SEQ ID NO: 6827 - DNA, 4654 bp, Homo sapiens
  misc_feature (1)..(4654): n=a,t,g or c
agtaattgctgtaccaaggtcagaatcgccacctgaggcctgaatatcagcgtaagatagtgtccaaagcagtcttaagaagaggtcccattaccccactctttccgccctaatggaggtctccagtttagcctcacagcatggaaccacaggttactctaaatgtgacttttaaaaatgaaattcaaagctttctggtttctgatccagaaaatacaacttgggctgatatcgaagctatggtaaaagtttcatttgatctgaatactattcaaataaaatacctggatgaggaaaatgaagaggtatccatcaacagtcaaggagaatatgaagaagcgcttaagatggcagttaaacagggaaaccaactgcagatgcaagtccacgaagggcaccatgtcgttgatgaagccccacccccagttgtaggagcaaaacgactagctgccagggcagggaagaagccacttgcacattactcttcactggtgagagtcttgggatcagacatgaagaccccagaggatcctgcagtgcagtcgtttccacttgttccatgtgacacagaccagcctcaagacaagcccccagactggttcacaagctacctggagacgttcagagaacaagtggttaacgaaacggttgagaagcttgaacagaaattacatgaaaagcttgtcctccagaacccatccttgggttcttgtccctcagaagtctcaatgcctacttcagaagaaacattgtttttgccagaaaaccagttcagctggcatattgcttgcaacaactgccaaagaaggattgttggtgtccgctaccagtgtagcctatgcccatcctacaatatctgtgaagattgtgaagcagggccatatggccatgacactaaccacgtcctgctgaagttgcggagacctgttgtgggctcctctgaaccgttctgtcactcaaagtactctactcctcgtcttcctgctgctctggaacaagtcaggctccagaaacaggttgataagaactttcttaaagcagaaaagcaaaggttgcgagctgagaagaaacaacgtaaagcagaggtcaaggaacttaaaaagcagcttaaactccataggaaaattcacctgtggaattcaatccatggactccagagccccaagtctcctttaggccgacctgagagcttgctccagtctaataccctgatgctccctttgcagccctgtacctccgttatgccaatgctcagtgcagcatttgtggatgagaatttgcctgatgggactcaccttcagccaggaaccaagtttatcaaacactggaggatgaaaaatacaggaaatgtaaagtggagtgcagacacaaagctcaagttcatgtggggaaacctgactttggcttccacagaaaagaaggatgttttggttccctgcctcaaggccggccatgtgggagttgtatctgtggagttcattgccccagccttggagggaacgtatacttcccattggcgtctttctcacaaaggccagcaatttgggcctcgggtctggtgcagtatcatagtagatcctttcccctccgaagagagccctgataacattgaaaagggcatgatcagctcaagcaaaactgatgatctcacctgccagcaagaggaaacttttcttctggctaaagaagaaagacagcttggtgaagtgactgagcagacagaagggacagcagcctgcatcccacagaaggcaaaaaatgttgccagtgagagggagctctacatcccatctgtggatcttctgactgcccaggacctgctgtcctttgagctgttggatataaacattgttcaagagttggagagagtgccccacaacacccctgtggatgtgactccctgcatgtctcctctgccacatgacagtcctttaatagagaagccaggcttggggcagatagaggaagagaatgaaggggcaggatttaaagcacttcctgattctatggtgtcagtaaagaggaaggctgagaacattgcttctgtggaggaagcagaagaagacctgagtgggacccagtttgtgtgtgagacagtaatccgatcccttaccttggatgctgccccagaccacaaccctccttgcagacagaagtccttgcagatgacatttgccttgcctgaaggaccacttggaaatgagaaggaggagattatccatatcgctgaggaagaagctgtcatggaggaggaggaggatgaggaggatgaggaggaggaggatgagctcaaagatgaagttcaaagtcagtcctctgcttcctcagaggattacatcatcatcctgcctgagtgctttgataccagccgccccctgggggattctatgtacagctctgcgctctcacagccaggcctggagcgaggtgctgaaggcaagcctggggttgaggctgggcaggaaccagctgaggctggggaaagactccctggaggggagaaccagccacaggagcacagcataagtgacatcctcacgacctcacagactctggaaacagtgcccctaatcccagaggtagtggagcttccaccgtcactgcccaggagctctccttgtgtacatcatcatggttccccaggagtggatttaccagttaccataccagaagtttcttcagtccctgatcagatcagaggagagcccagaggctcatcaggacttgtaaacagcagacagaagagctatgaccactcaaggcaccatcatgggagcagcattgctggaggactggtgaagggggctttgtctgttgctgcctctgcatacaaggccctgtttgctgggccaccagtcactgcacagccaataatttctgaagatcagacagcagccctgatggcccatctctttgaaatgggattctgtgacaggcagctgaacctacggctgctgaagaaacacaattacaatatcctgcaggttgtgacagaacttcttcagttaaacaacaacgactggtacagccaacgctattgaggagtgaccttgtattaaataactgcctgctgctcagagatgatctttattctgtcattggggtatgggatagaagcccttgcttatttttaatctgatgaatctgtatagagcccatcgttgagttaccaagacaatacctgctacagtattttggggagcaaactaaagaccagaacttaaattttcactttagacattggatgaatagtatgaagacagtttttcagttgatttggataaaactattttagtgcattgacaagtgtaacttcaacttcatatagaaccatttttctttctgcttttattgaaactgagtatttttctttggctaatgtggattttttatggggatatctgttaattttcaggttttgaaagacattaacctcggaagttgtttttaagaattattctcataattcttattctcataatttctgtaatccacctcaagcttcatagttatttggcattgaaataacacccagagcatgatagaaatgttgttactcttcctctctcaaggagaaagtaattttcctgcaatacttaataattggcaccgttgctttctaaagactccatggtgcattcaagagtatccaacttcaagggaatctccgcatttcaatgaaaggaggaagagtgtgctgataaacctaccagcacctattgagcaatgtctattatagtaattttgcatacatttttatttaagggaaaaaatataggtattgtgaaatattttgctaatcttatagaaaaggaaaaaatcccgttatttaaagggaaaagtaaatttaacagttgccttttttcttaatgtcagggcagatcttattttacagtacagtgggggaaatagaaaacatgtgaaaggcaaaaggcaggctcctaaattaatgtcagtgaagttcagggtgggcaaatgagtgtgtgtgaggtataggaaatgctgatgacttctttaatgcttgaagtccgttcacaggtatctagccctagaatgcctagaacaggaagaggcagctggtgttctgcaaaacttggacaggggcaaagttgctgaaaaagttttggtttaacccgaagataagtggaaaagagcttgtccatgaacccaggttctcactctgtttacagaagtgtgttgagtacagttggtgaaggaagaggtaacaaaaaatgctaaatattttatccatgaaaatgacttccagaaaaggaagaatatgaaccccagaccgaaggggaaaagatagttaatagtattatctaacctggttggtatttgtaatgaatggtgattttaattagtcattagccataatgatgtttatttacagtataactcctgaatgctacttaaataaaccaggattcaaactgcaagccagccaggccgttcattatttaaaacgttttaatcggggcttccgggtagaaggtggagcggcagggtgtaattgggttgatgggtgggacctgtcttgaccatcggagttttataatcgagggccaggagggcccgggttgctctcctggttatgtatgtacttgtacataaccaccttaagaatggtgaaataaatgttcttggaaattcc

SEQ ID NO: 6828 - DNA, 4379 bp, Homo sapiens
  misc_feature (1)..(4379): n=a,t,g or c
aggaaactcccagggcccgcccaggacccccaagccgccgcggacgcagcccaggatggcggcccaggtgactctggaggacgcgctgtccaacgtggacctcctggaggagctgcccctgcccgaccagcagccctgcatcgagcccccgccatcctcgctgctctaccagccaaatttcaacactaactttgaagacagaaatgcatttgttactggcatcgcaagatacattgaacaagccaccgtccactctagcatgaacgagatgctggaggagggccaagaatatgctgtcatgctgtacacctggaggagctgctcccgggccatcccacaggtgaaatgtaacgagcagcctaacagagtggaaatctacgagaaaaccgtggaggttctggagcctgaggtcacaaaactgatgaatttcatgtacttccagagaaatgccattgagcgtttctgcggggaagtgaggcgcctgtgccatgccgagaggaggaaggacttcgtgtcagaagcctacctgatcacactgggcaaattcatcaacatgttcgctgtgctggacgagctgaagaacatgaagtgcagtgtgaagaacgaccactcagcgtacaagagggccgctcagtttttacgtaaaatggcagatccacagtccatccaggaatcgcagaatctgtccatgttcctggccaatcataacaagatcacacagtctctgcagcagcagctcgaagtgatttctggctacgaagagctcctggcagatattgtgaatctgtgtgtggattactacgagaacaggatgtatttgacgcccagtgagaaacacatgcttctcaaagtcatgggatttggtctgtacctgatggatgggagtgtcagtaacatctataagttggatgccaagaaaagaataaacttatccaaaatcgacaagtacttcaagcaactccaggtggttccgctatttggggacatgcaaatagaactggcaagatatatcaagaccagcgcccactacgaggaaaataaatctcgatggacgtgcacatcctccggcagcagccctcagtacaacatctgcgagcagatgatccagatccgcgaggaccacatgcgcttcatttcggagctggcgcgctacagcaacagcgaggtggtcacgggctcgggccgccaggaggcccagaagacggacgcggagtaccgcaagctcttcgacctggcgctgcagggcctgcagctgttgtcgcagtggagcgcgcacgtgatggaagtgtattcctggaagcttgtgcaccccaccgacaagtactccaacaaggactgccccgacagcgctgaagagtacgagcgtgccacgcgctacaactacaccagcgaggagaagtttgccctagtggaggtgatcgccatgatcaaaggcctgcaggtgctgatgggcaggatggagagcgtgttcaaccacgccatccggcacaccgtctatgccgcactgcaggacttctcccaggtgacccttagggagccgctgcggcaggccatcaagaagaagaagaacgtcatccagagtgtcctgcaggccatcaggaagaccgtgtgtgactgggagacggggcatgagcccttcaatgacccagccttgcggggcgagaaggaccccaagagcggcttcgacataaaagtaccacgccgcgccgtgggaccctccagcactcagctttacatggtgagaaccatgctagagtccctcattgcagacaaaagtggttccaagaaaaccttgagaagtagccttgaggggcccaccatattggacatagaaaaatttcatcgagagtcattcttctacactcacttgataaatttcagtgaaacgctgcagcagtgctgtgacctttcgcagctgtggttccgagagttcttcctggagctgaccatgggcaggaggatccagttccccattgagatgtcgatgccctggatcctgacggaccacatcctggagaccaaggaggcatcgatgatggagtacgtgctctactccctggacctgtacaatgacagcgcccactacgcgctcaccaggttcaacaagcagttcctgtacgacgaaattgaggccgaggtgaatctatgttttgaccaatttgtttacaagctagcagaccagatatttgcctattataaggttatggcaggaagtttgcttcttgataaacggttacgatcagaatgcaagaatcagggagccacgatccacctcccgccgtctaaccgctacgagacgctgctgaagcagaggcatgtgcagctcctcggcagatcaatagacctcaatcgtctgatcacccagcgcgtctcagcagccatgtataagtccctagaactggcgattggacgatttgaaagtgaagatttgacctccatagttgagctggatggcctgttggaaatcaaccgcatgacccacaagctgctgagccggtacctgacgctggacggcttcgacgccatgttccgggaggccaaccacaacgtgtcagcgccctacgggaggatcaccctgcacgtcttctgggagctcaactatgacttcctgcccaactactgctacaacggctctaccaaccggtttgttcggacagtgttaccattttctcaggaatttcaaagagataagcagcctaatgcacagcctcagtatctgcatggatccaaggctttgaacttggcctactccagcatttacggcagctaccggaacttcgtgggacctccacactttcaagtcatctgccggcttctcggctaccagggtatcgccgtggtcatggaggagctgctgaaggtcgtcaagagcctgctgcaaggcacaatcctgcagtacgtgaagacgctgatggaggtgatgcccaagatctgccgcctgccccggcacgagtacggctctcctggtatcctggagttcttccaccaccagctgaaggacatcgtggagtacgcagagctgaagacggtgtgcttccagaacctgcgggaggtggggaacgccatcctcttctgcctgctcatcgagcagagcctgtctttagaagaagtgtgtgacctgctgcacgcggctcctttccagaacatcttgccgcgagtccatgtgaaagagggggagagacttgatgccaaaatgaaaagactagaatcaaagtacgccccgctgcatcttgtcccactgattgaaagactggggacccctcagcaaattgccatcgcaagagagggggacctgctgacaaaggagcgcctctgctgcggcctgtccatgtttgaggtcatcctgacacggatccggagctttctggatgaccccatctggcgcgggcctctgcccagcaatggggtcatgcatgtggacgagtgtgtggagtttcacagactgtggagtgccatgcagtttgtctactgcattcccgtggggacacacgagttcacagtcgagcagtgctttggtgatgggctacactgggctggctgtatgatcatcgtacttcttgggcagcagcggcgttttgctgtgctggatttctgctaccatctacttaaagtccagaaacatgatggcaaagatgagattattaaaaatgtgcctttgaagaagatggtggagagaattcgcaagttccagattctcaatgatgagatcatcaccatcctggataagtacctgaagtcaggcgacggggagggcacgccagtggagcatgtgcgctgcttccagccgcccatccaccagtccctcgccagcagctgagggcacgcgctgcactccgtaactcaacatggcatgcctttctctccgtaaactatttagtgagatttttagggactatttttcagtatctctgtacctgttaaagggggtgcttttcgatctaaaaacttaattttataaaattgacttatttttctagactaaaattgtatatgcttttggtaattaggaactcttgagaatattggctgctgattgttgccatcacgttcctacaaaattgtttttctatgggatgttctggcagctgtgtcataaaatgctgctgggttcattcattcattccataagaaacttaataccagcaaatgcattaaatcccttgccagttaccattaactataactatttagcttttgtttagggatctttctgatgggcttttatgagcaatcttagttctaagtcattgttcccatcccttttttgtgtgtttcagaaaatagtgaacttgattcccctgcttccactaaatccagttgtgacaaaatctaacgtgacatcagatcgaaaggttatagaaataaaactaatgagatct

SEQ ID NO: 6829 - DNA, 4565 bp, Homo sapiens; identical to SEQ ID NO: 6582
  misc_feature (1)..(4565): n=a,t,g or c

SEQ ID NO: 6830 - DNA, 5319 bp, Homo sapiens
  misc_feature (1)..(5319): n=a,t,g or c
gaagatcggggggctgaaatccatcttcatcctaccgctccgcccgtgttggtggaatgagcgttgcatgtgtcttgaagagaaaagcagtgctttggcaggactctttcagcccccacctgaaacatcaccctcaagaaccagctaatcccaacatgcctgttgttttgacatctggaacagggtcgcaagcgcagccacaaccagctgcaaatcaggctcttgcagctgggactcactccagccctgtcccaggatctataggagttgcaggccgttcccaggacgacgctatggtggactacttctttcagaggcagcatggtgagcagcttgggggaggaggaagtggaggaggcggctataataatagcaaacatcgatggcctactggggataacattcatgcagaacatcaggtgcgttccatggatgaactgaatcatgattttcaagcacttgctctggagggaagagcgatgggagagcagctcttgccaggtaaaaagttttgggaaacagatgaatccagcaaagatggaccaaaaggaatattcctgggtgatcaatggcgagacagtgcctggggaacatcagatcattcagtttcccagccaatcatggtgcagagaagacctggtcagagtttccatgtgaacagtgaggtcaattctgtactgtccccacgatcggagagtgggggactaggcgttagcatggtggagtatgtgttgagctcatccccgggcgattcctgtctaagaaaaggaggatttggcccaagggatgcagacagtgatgaaaacgacaaaggtgaaaagaagaacaagggtacgtttgatggagataagctaggagatttgaaggaggagggtgatgtgatggacaagaccaatggtttaccagtgcagaatgggattgatgcagacgtcaaagattttagccgtacccctggtaattgccagaactctgctaatgaagtggatcttctgggtccaaaccagaatggttctgagggcttagcccagctgaccagcaccaatggtgccaagcctgtggaggatttctccaacatggagtcccagagtgtccccttggaccccatggaacatgtgggcatggagcctcttcagtttgattattcaggcacgcaggtacctgtggactcagcagcagcaactgtgggactttttgactacaattctcaacaacagctgttccaaagacctaatgcgcttgctgtccagcagttgacagctgctcagcagcagcagtatgcactggcagctgctcatcagccgcacatcggtttagctcccgctgcgtttgtccccaatccatacatcatcagcgctgctcccccagggacggacccctacacagctggattggctgcagcagcgacactaggcccagctgtggtccctcaccagtattatggagttactccctggggagtctaccctgccagtcttttccagcagcaagctgccgctgccgctgcagcaactaattcagctaatcaacagaccaccccacaggctcagcaaggacagcagcaggttctccgtggaggagccagccaacgtcctttgaccccaaaccagaaccagcagggacagcaaacggatccccttgtggcagctgcagcagtgaattctgcccttgcatttggacaaggtctggcagcaggcatgccaggttatccggtgttggctcctgctgcttactatgaccaaactggtgcccttgtagtgaatgcaggcgcgagaaatggtcttggagctcctgttcgacttgtagctcctgccccagtcatcattagttcctcagctgcacaagcagctgttgcagcagccgcagcttcagcaaatggagcagctggtggtcttgctggaacaacaaatggaccatttcgccctttaggaacacagcagcctcagccccagccccagcagcagcccaataacaacctggcatccagttctttctacggcaacaactctctgaacagcaattcacagagcagctccctcttctcccagggctctgcccagcctgccaacacatccttgggattcggaagtagcagttctctcggcgccaccctgggatccgcccttggagggtttggaacagcagttgcaaactccaacactggcagtggctcccgccgtgactccctgactggcagcagtgacctttataagaggacatcgagcagcttgacccccattggacacagtttttataacggccttagcttttcctcctctcctggacccgtgggcatgcctctccctagtcagggaccaggacattcacagacaccacctccttccctctcttcacatggatcctcttcaagcttaaacctgggaggactcacgaatggcagtggaagatacatctctgctgctccaggcgctgaagccaagtaccgcagtgcaagcagcgcctccagcctcttcagcccgagcagcactcttttctcttcctctcgtttgcgatatggaatgtctgatgtcatgccttctggcaggagcaggcttttggaagattttcgaaacaaccggtaccccaatttacaactgcgggagattgctggacatataatggaattttcccaagaccagcatgggtccagattcattcagctgaaactggagcgtgccacaccagctgagcgccagcttgtcttcaatgaaatcctccaggctgcctaccaactcatggtggatgtgtttggtaattacgtcattcagaagttctttgaatttggcagtcttgaacagaagctggctttggcagaacggattcgaggccacgtcctgtcattggcactacagatgtatggctgccgtgttatccagaaagctcttgagtttattccttcagaccagcagaatgagatggttcgggaactagatggccatgtcttgaagtgtgtgaaagatcagaatggcaatcacgtggttcagaaatgcattgaatgtgtacagccccagtctttgcaatttatcatcgatgcgtttaagggacaggtatttgccttatccacacatccttatggctgccgagtgattcagagaatcctggagcactgtctccctgaccagacactccctattttagaggagcttcaccagcacacagagcagcttgtacaggatcaatatggaaattatgtaatccaacatgtactggagcacggtcgtcctgaggataaaagcaaaattgtagcagaaatccgaggcaatgtacttgtattgagtcagcacaaatttgcaagcaatgttgtggagaagtgtgttactcacgcctcacgtacggagcgcgctgtgctcatcgatgaggtgtgcaccatgaacgacggtccccacagtgccttatacaccatgatgaaggaccagtatgccaactacgtggtccagaagatgattgacgtggcggagccaggccagcggaagatcgtcatgcataagatccggccccacatcgcaactcttcgtaagtacacctatggcaagcacattctggccaagctggagaagtactacatgaagaacggtgttgacttagggcccatctgtggcccccctaatggtatcatctgaggcagtgtcacccgctgttccctcattcccgctgacctcactggcccactggcaaatccaaccagcaaccagaaatgttctagtgtagagtctgagacgggcaagtggttgctccaggattactccctcctccaaaaaaggaatcaaatccacgagtggaaaagcctttgtaaatttaattttattacacataacatgtactattttttttaattgactaattgccctgctgttttactggtgtataggatacttgtacataggtaaccaatgtacatgggaggccacatattttgttcactgttgtatctatatttcacatgtggaaactttcagggtggttggtttaacaaaaaaaaaaagctttaaaaaaaaaagaaaaaaaggaaaaggtttttagctcatttgcctggccggcaagttttgcaaatagctcttccccacctcctcattttagtaaaaaacaaacaaaaacaaaaaaacctgagaagtttgaattgtagttaaatgaccccaaactggcatttaacactgtttataaaaaatatatatatatatatatatatataatgaaaaaggtttcagagttgctaaagcttcagtttgtgacattaagtttatgaaattctaaaaaatgccttttttggagactatattatgctgaagaaggctgttcgtgaggaggagatgcgagcacccagaacgtcttttgaggctgggcgggtgtgattgtttactgcctactggatttttttctattaacattgaaaggtaaaatctgattatttagcatgagaaaaaaaatccaactctgcttttggtcttgcttctataaatatatagtgtatacttggtgtagactttgcatatatacaaatttgtagtattttcttgttttgatgtctaatctgtatctataatgtaccctagtagtcgaacatacttttgattgtacaattgtacatttgtatacctgtaatgtaaatgtggagaagtttgaatcaacataaacacgttttttggtaagaaaagagaattagccagccctgtgcattcagtgtatattctcaccttttatggtcgtagcatatagtgttgtatattgtaaattgtaatttcaaccagaagtaaatttttttgttttgaaggaataaatgttctttatacagcctagttaatgtttaaaaagaaaaaaatagcttggttttatttgtcatctagtctcaagtatagcgagattctttctaaatgttattcaagattgagttctcactagtgtttttttaatcctaaaaaagtaatgttttgattttgtgacagtcaaaaggacgtgcaaaagtctagccttgcccgagctttccttacaatcagagcccctctcaccttgtaaagtgtgaatcgcccttcccttttgtacagaagatgaactgtattttgcattttgtctacttgtaagtgaatgtaacatactgtcaattttccttgtttgaatatagaattgtaacactacacggtgtacatttccagagccttgtgtatatttccaatgaacttttttgcaagcacacttgtaaccatatgtgtataattaacaaacctgtgtatgcttatgcctgggcaactattttttgtaactcttgtgtagattgtctctaaacaatgtgtgatctttattttgaaaaatacagaactttggaatctg

SEQ ID NO: 6831 - DNA, 419 bp, Homo sapiens; identical to SEQ ID NO: 3212
  misc_feature (1)..(419): n=a,t,g or c

SEQ ID NO: 6832 - DNA, 6322 bp, Homo sapiens
  misc_feature (1)..(6322): n=a,t,g or c
ctgagagcgacatgtccccggcggctcaggcggagcggcccgtggcgctgtttttctgagtccggggtggcctggcagccggccgaggacgagggtcggcgggggctgcccccgtggtggtggccgccatgctgggagcctgggcggttgagggaaccgctgtggcgctcctgcgactgctgctgctgctgctgccgccggcgatccggggacccgggctcggcgtggccggcgtggccggcgcggcgggggccgggctgcccgagagcgtcatttgggcggtcaacgcgggtggagaggcgcatgtggacgtgcacgggatccacttccgcaaggaccctttggaaggccgggtgggccgagcctcagactatggcatgaaactgccaatcctgcgttccaaccctgaggaccagatcctgtatcaaactgagcggtacaatgaggagacctttggctacgaagtgcccatcaaagaggagggggactacgtgctggtcttgaaatttgcagaggtctactttgcacagtcccagcaaaaggtatttgatgtacgattgaatggccacgtcgtggtgaaggacttggatatctttgatcgtgttgggcatagcacagctcacgatgaaattatacctatgagcatcagaaaggggaagctgagtgtccagggggaggtgtccaccttcacagggaaactctacattgagtttgtcaaggggtactatgacaatcccaaggtctgtgcactctacatcatggctgggacagtggatgatgtaccaaagcttcagcctcatccgggattggagaagaaagaagaggaagaagaagaagaagaatatgatgaagggtctaatctcaaaaaacagaccaataagaaccgggtgcagtcaggcccccgcacacccaacccctatgcctcggacaacagcagcctcatgtttcccatcctggtggccttcggagtcttcattccaaccctcttctgcctctgccggttgtgagaacaaatgactatcctgaacagggtggaggggtgtgggaaagaaaccagccatattggttttggtttctgtatttttcacaatgattaatgaacaaaaacaaagagaaaaaaaacacacatcaattaaaggagacaaaaagaggcagagcgagtagagagcagccctcattcaccacctggtcccagacgtgcttcagtcctcgtcctctctttgtggctggctcccagccttctctttcctcttgaggatacttagggtaaactggatccttcctgctcaaggatcctcatttgtatacctagtggaaaggactctgaactcagaggagtcactgttcctttttttaggttagaaattaacagcagggaaatgccatcttattacctgagacgaccagcactgggagttaggtacggtctgaagttatgtctagataagacttcagacgtcctgggattgaaagaatgtgtgtgaaggggtagaatttgtgcggtaaagacttaaaaaaaaaagtagggagattaaaaaaaaagaaagaaaatgcttccttatctggaagcctttctggattaatccagtgatggtcccacctttagtgtttgagctttgtcattgcttgtctccctggcatgtgccagttatagactgtccagcatccaagacgtttcggttatgtcgggtcctcagatcgcctctgacttgttaccacaacaaatcattttgatttcagtgcctgttggggacttgatttcttctcaggttttgtttgtttgtttgtttccttaatctggctcatttgaaatttcttctccctctcaaccatcccactaagttatagccaagaagggaaggagacacggggatttggggttctctgcttgaatgtcttctcctttaccacctcaccttgttggtacctccctccctggatctctgagccagcagccaggaggacctgacccagcagttctttactggcccctttgtagggccttgctgccagggggcagggatgctttccagcctgcagcaacagaacacttgaccttaaaagtctcttctggtctttggattagaaaaggcttatgttagcatagcttaagagcaacctcagagacttgagccctactaagtgactgaccactgtttagagtgtctggtatctgatgttcatttattcccatgttcttgtgtgtcacagttcagccagttttggtttatgcctagagctacttcaaggaactagactaattagctatataggcccagcgatgcttcttattgatcttaatagtatgcccttccttcccctgtcctttcatttctctatccaagtagcagtcaggttcttggtgtgatgggactgaaagaattccagtcagccagagccttggcagctctgaagctaaccttagcatctaagtgtcgatcttgaattccctgaaaaaatttctataggaaatgaagcttccctggtcccctcctttctggccattgtcatccatttcccagttagggcaacaatgaaggaggacccagccaagctagaaggaattttgtggatgggagacagcaggattagcttcagcttgggctggagcagtcaatataggatctcaggccaggcccgcttttctagaatgtgtttaattttgagtttgctttattagatatgttttttaagagctctgtatatttgaactgctccttatgtgacaaaataggtagctcttgggctcatgtcctgggttttggctctttaatgattactccaggccagcatttagtcgtttgagaattgtagcctgttgttttcgctgtgacttgggtctcagtgctagggtattgagtcaggcagctggagggttgtggcccgaggctgcagtcagaggtatacttcccatagtgcttcacacagctcccctgcttctaaaggataaggtactgtagccttggtcctggggaccacctgcctggggcagtggacatcctaactaaacaggcttctggcagtagctttggttcctatcccatcgaaattccccaaagccctgggccactgccattgggttagtcaagatgaaggaggaggactggctgcctccattttgccttgtttgttagtttgcctgggtctgtctgaggaaggagggggtcccgccttccacctcaacacatcccttcagtgactcagagtctcagaaggaaaccctgactcctggggccatttcctaatggtactgtaagccaagcagctttgcttctgcctctgtttccaagcccacccttttcccctgagctcagggttagggatgggcgctttcctctctggttgtgaacgaaaggaaggaacatctttctatggctaacaaaaactaaaggggaagtgaggaaacaggaagaagtatggtgggggctggggtagactcccctggagccaagcctatccagctaacaagagctccctggggctggtcacagctggctcatgatgctgaacttgaaagtttttttgtttttgtttttgttttgtggctcctccaagatataggtacatgaagtttaggttaaaggggtgggattctttatttttatttttgtattgtatgtgtcaagaattactctgttgttcaccttttgctttttgcactgtttgttctcttatctgtattttgagcttagtgctaggactgagaggctgcaccatagggaatgtatgggagatggtgaggggtgccagtgaggggtgcgtggaggagaggcctgggctcctctactggatctacactctgtcccaggtttttagatcccactgagcccagctgactgaaaacaaggacagtcagggtgaaacttcttttgccagaagtgtggcctgagttgaatttctgggaggatgacgcagatgtctgctgcagagctgggctgagagttctgcagtctagctctgacttaggtcaggggcctgttggtctctcattggacgtttttgggtctcactcatgcttactgaaacattgtgccaagaaactctgtgggatttgtgtcccttaaaccagactcacttttctgaaaaatctccattgttgaggagaggctgctcaatcgacaccccgagttctcatgactgggaagatagttttcttcaggtgtcaatggcgttagactcccaggaagactagccctgcccacagggccacctgttggtttgagagcgtgttcgtgttctcttgccctccctgcctaagagctactgggatcacgttagcgggcatttaggctttgatgagagggcacagtttgagttaggtttacctccccctttctgtgcctgggaactgtttggtccagctttagaactgtggttttgacttccttatctcttgggagaagcttctgttttaaggaatttctcttccttcttctcctgcctctagcctctcctggaaaggcctggatatggtttctaaaatctcagctgagaacttcagaaaacagcagcagtattttccttttcctagtgctaaaatccctttccctagaaattggctcaccttgggaaacccagggaaagaatcagcaggttctctgccctccctaggggttggggaaggacccaccccggtcagcacagtgccttttcctctcctgctctgagccagggtggggcattccctctagattcaggtttgggcaggggtcctatagtccctgccatggggctgcttccctgtcccttccctcccctttgctggcctactctggcataattcaagtgtcttcttgccttggggatccttagtggcatcaaatggcaacatggaatattgtcctccatgcccctccagaaggacctaggagagtaggtgagctttccaaagtgagagacgaatctttctttctttttttttttaaagggcaggatgggtatgctttgggctttctccttctgtggccccggaggaaggagagactgaggcaaggcaaagtgatagtacactgaagcagaaccggaaacacccaggaactgttcagaaatctcagaagaaatctgcttctcttcgatggaaagatataattaacgatcaaagagctctaagaaaattgcaaagaagccttaatgttcaagctttagaaagatcagagcaatttttctctttcagtccaaactaagactctctgtatttaaatctctctggggcaagagggctagatttcctcattttgttatgagactagattggtaccagtagatcagctgcctagcgagggcaggtttcttctttgcatctgtgtggcttgcttccagtctggcctgtcctttccagctgccttttgtctagcctgctatggggggccagattatcttgataagagcaggtgatttggggactagctgggttggtaggaaaagagcaggatggatctcttgggacaggttcccccaggagtataaacacaaggagccaggattgtcctggcagccaaggaaacagtagtgcctgtttgagttggcagagagggccttggcacctcttgcatccaggcagtcttgtgagatgggggcacatagcactggggaaagcagaactccattctcacctctattttgagcttcagtgctttatttcagtatgaggaaaaacaacaacaaactgaagtgcgctttccgtcctttcaaaggacaactgtcgggaagggagagccgagttgcgaggtaggaggggagcactggcagggagagacattcttgactcctctcttccctggtgtgttgtgatccagggaatgaaaagaaatttgaccctggattggttctctccttggacttaaggaatcttaccttttccttccacaaagttctcccaggcaaggaccagctgcccattctgagcccagggcagcctcttcaaccattattggtctaacctggcttgtcaggaaaccaagcccacccttccacattgggcctggctgctctattctgtaccaagtactggagaaaaagcatcaagttcttagcccttgtagcttctaccctagtttcccatcctctctctgtggaggccaaaccaactctttgccagcagccacaacatgcattgacagcggcacagtgagatataactgatgggctttgaacctggttggccggggaagctgtaggggtggatagagctggctttccttctgggctgtctccatctgaccctaccccttccatgtcccaccccactcccaccaaaaagtacaaaatcaggatgtttttcactgtccattgctttgtgttttaataaacaatttgcagtgac

SEQ ID NO: 6833 - DNA, 1072 bp, Homo sapiens
  misc_feature (1)..(1072): n=a,t,g or c
gaattccgtatagtgaagatgatgtaaatgaattagtgaaggaagatgaagtggatggtgaagagcagacacagaaaacccaagggaaaaaaagaaaggcccagagcattccagccaggaagagaagacaaggtggcctctcattagaagaagaggaagaggaggatgccaattcagaatctgagggaagcagtagtgaggaggaagatgacgctgcagagcaggaaaaaggcattggatcagaggatgccaggaaaaagaaggaggacgaactctgggccagcttcctcaatgatgtgggaccaaaatcaaaagtgcccccaagtacacaagttaagaaaggagaggagactgaagagacaagttcaagtaaattgttggtaaaagcagaagagctagagaaacctaaagaaacagaaaaagttaaaatcaccaaggtgtttgattttgctggtgaagaagtaagggtaactaaggaagtggatgctacatctaaagaggccaaatccttcttcaagcagaatgagaaagaaaaaccacaggctaatgttccttcagctctgccatcactccctgccgggtcagggttaaaaagatcaagtggcatgagcagccttttggggaaaattggtgccaagaagcagaaaatgagcacccttgagaagtccaaactggactgggagagcttcaaggaggaagaggggattggtgaagaactggccatccataatcgagggaaagaggggtacattgaacggaaagccttccttgaccgagtggatcacaggcagtttgaaattgagcgagatctcaggctgagcaaaatgaaaccttgatgttacgggctaaatcaagagcagcttaatcctgtttacaatgtgagctttttgtgcgtctgtgaaatgttttacagtgtttctcatcatctgtttcccagcaaggtcttttttttttctacattgaagttctgtctatgtatcttaatcacaaatggtttcattcactttacttttaaaaatttgtccttaaatgaataaataaaataaaagttggtcctgtgagaggggaattc

SEQ ID NO: 6834 - DNA, 2491 bp, Homo sapiens
  misc_feature (1)..(2491): n=a,t,g or c
ggagcggccaacatggcggaacgcaggagacacaagaagcggatccaggaagttggtgaaccatctaaagaagagaaggctgtggccaagtatcttcgattcaactgtccaacaaagtccaccaatatgatgggtcaccgggttgattattttattgcttcaaaagcagtggactgtcttttggattcaaagtgggcaaaggccaagaaaggagaggaagctttatttacaaccagggagtctgtggttgactactgcaacaggcttttaaagaagcagttttttcaccgagccctaaaagtaatgaaaatgaaatatgataaagacataaagaaagaaaaagataaaggaaaagctgaaagtggaaaagaagaagataaaaagagcaagaaagaaaatataaaggatgagaagacaaaaaaagaaaaagagaaaaaaaaagatggtgaaaaggaagaatccaaaaaggaggaaactccaggaactcctaaaaagaaggaaactaagaaaaaattcaaacttgagccacatgatgatcaggtttttctggatggaaatgaggtgtatgtatggatctatgacccagttcactttaaaacatttgtcatgggattaattcttgtgattgcagtaatagcggccaccctcttccccctttggccagcagaaatgagagtaggtgtttattacctcagtgtgggtgcaggctgttttgtagccagtattcttctccttgctgttgctcgatgcattctatttctcatcatttggctcataactggaggaaggcaccacttttggttcttgccaaatctgactgctgatgtgggcttcattgactccttcaggcctctgtacacacatgaatacaaaggaccaaaagcagacttaaagaaagatgagaagtctgaaaccaaaaagcaacagaagtccgacagtgaggaaaagtcagacagtgagaaaaaggaagatgaggaggggaaagtaggaccaggaaatcatggaacagaaggctcggggggagaacggcattcagacacggacagtgacaggagggaagatgatcgatcccagcacagtagtggaaatggaaatgattttgaaatgataacaaaagaggaactggaacagcaaacagatggggattgtgaagaggatgaggaagaggaaaatgatggagaaacacctaaatcttcacatgaaaaatcataatctgactaattttgggactgaatgaataagtacaagaggttggattttctatgttggctgattaccatattgaacacatggcatttgtagcattctttaaatctatctactgagatgtatttgacattcaagcagttatattcggtccttcattttatagaatattggcactattattggtacagtttaaagccattaatatgttttatccatttgataattttacagtaagtaggtctcattcattttgacagttatcaaagatgtactttccacagttaaatttacattaatggcaatttttgatagttttatggctttttactgttagactaatcaaaaataactttaaaaggaacaaagaaactccaacatttcacattatgcatagttatgtagccatttcacagtttctttaagatgtgtaaactcattgtccttgatagtttttatttttcattataaaattataccaggagatttcttttaagattctgagttagcagagttcaaaactattttgtggaaacaagccaactagtaacaatgcagcaacacttctggtttagctaaattatttttccaatgtaggaaatccacactgatttgtacgtctgactgagagaaagatggtcgtctccagcagagaaagtgaacagcatttgttggaaggtgatggctctccctcctccctccccatttcattggcgtaacgtaaagtgtattctgtacataatttacaaataaaacattttattttaattgttacttattatttagatatttctcaacacttaaattcataaaattaagaccatgtaagggtatgtttttagagaaatggaagtttgagtaacccacagaacatctgtgatctttctacagcagcttcagttttgtgccaacattccatgtattttgaatatgagcaaaaactgatcttaagagcagacttaaagtagctttgtacgccttaatgttcattttgatttattttaaatctttacattcagaaatgagatactgtattatcagaccaggaggcattgctgtgaaagataatttcctattctaaaatatcaaatttaaaataaagataatgaaagaaaacataagagaactattggactctaattgctttgaactagttttgcagtttgactttacgtcttatacatcttagttacaagtctttggaaactcttgtttacttatgagcataatcattccttggagttatactaactaataatgaatattaaatgatttttcttcagtc

SEQ ID NO: 6835 - DNA, 5316 bp, Homo sapiens; identical to SEQ ID NO: 5249
  misc_feature (1)..(5316): n=a,t,g or c

SEQ ID NO: 6836 - DNA, 3890 bp, Homo sapiens; identical to SEQ ID NO: 132
  misc_feature (1)..(3890): n=a,t,g or c

SEQ ID NO: 6837 - DNA, 3112 bp, Homo sapiens
  misc_feature (1)..(3112): n=a,t,g or c
gtggaacctcgatattggtggtgtccatcgtgggcagcggactaataaaggccatggcgccagcagaaatcctgaacgggaaggagatctccgcgcaaataagggcgagactgaaaaatcaagtcactcagttgaaggagcaagtacctggtttcacaccacgcctggcaatattacaggttggcaacagagatgattccaatctttatataaatgtgaagctgaaggctgctgaagagattgggatcaaagccactcacattaagttaccaagaacaaccacagaatctgaggtgatgaagtacattacatctttgaatgaagactctactgtacatgggttcttagtgcagctacctttagattcagagaattccattaacactgaagaagtgatcaatgctattgcacccgagaaggatgtggatggattgactagcatcaatgctgggagacttgctagaggtgacctcaatgactgtttcattccttgtacgcctaagggatgcttggaactcatcaaagagacaggggtgccgattgccggaaggcatgctgtggtggttgggcgcagtaaaatagttggggccccgatgcatgacttgcttctgtggaacaatgccacagtgaccacctgccactccaagactgcccatctggatgaggaggtaaataaaggtgacatcctggtggttgcaactggtcagcctgaaatggttaaaggggagtggatcaaacctggggcaatagtcatcgactgtggaatcaattatgtcccagatgataaaaaaccaaatgggagaaaagttgtgggtgatgtggcatacgacgaggccaaagagagggcgagcttcatcactcctgttcctggcggcgtagggcccatgacagttgcaatgctcatgcagagcacagtagagagtgccaagcgtttcctggagaaatttaagccaggaaagtggatgattcagtataacaaccttaacctcaagacacctgttccaagtgacattgatatatcacgatcttgtaaaccgaagcccattggtaagctggctcgagaaattggtctgctgtctgaagaggtagaattatatggtgaaacaaaggccaaagttctgctgtcagcactagaacgcctgaagcaccggcctgatgggaaatacgtggtggtgactggaataactccaacacccctgggagaagggaaaagcacaactacaatcgggctagtgcaagcccttggtgcccatctctaccagaatgtctttgcgtgtgtgcgacagccttctcagggccccacctttggaataaaaggtggcgctgcaggaggcggctactcccaggtcattcctatggaagagtttaatctccacctcacaggtgacatccatgccatcactgcagctaataacctcgttgctgcggccattgatgctcggatatttcatgaactgacccagacagacaaggctctctttaatcgtttggtgccatcagtaaatggagtgagaaggttctctgacatccaaatccgaaggttaaagagactaggcattgaaaagactgaccctaccacactgacagatgaagagataaacagatttgcaagattggacattgatccagaaaccataacttggcaaagagtgttggataccaatgatagattcctgaggaagatcacgattggacaggctccaacggagaagggtcacacacggacggcccagtttgatatctctgtggccagtgaaattatggctgtcctggctctcaccacttctctagaagacatgagagagagactgggcaaaatggtggtggcatccagtaagaaaggagagcccgtcagtgccgaagatctgggggtgagtggtgcactgacagtgcttatgaaggacgcaatcaagcccaatctcatgcagacactggagggcactccagtgtttgtccatgctggcccgtttgccaacatcgcacatggcaattcctccatcattgcagaccggatcgcactcaagcttgttggcccagaagggtttgtagtgacggaagcaggatttggagcagacattggaatggaaaagttttttaacatcaaatgccggtattccggcctctgcccccacgtggtggtgcttgttgccactgtcagggctctcaagatgcacgggggcggccccacggtcactgctggactgcctcttcccaaggcttacatacaggagaacctggagctggttgaaaaaggcttcagtaacttgaagaaacaaattgaaaatgccagaatgtttggaattccagtagtagtggccgtgaatgcattcaagacggatacagagtctgagctggacctcatcagccgcctttccagagaacatggggcttttgatgccgtgaagtgcactcactgggcagaagggggcaagggtgccttagccctggctcaggccgtccagagagcagcacaagcacccagcagcttccagctcctttatgacctcaagctcccagttgaggataaaatcaggatcattgcacagaagatctatggagcagatgacattgaattacttcccgaagctcaacacaaagctgaagtctacacgaagcagggctttgggaatctccccatctgcatggctaaaacacacttgtctttgtctcacaacccagagcaaaaaggtgtccctacaggcttcattctgcccattcgcgacatccgcgccagcgttggggctggttttctgtaccccttagtaggaacgatgagcacaatgcctggactccccacccggccctgtttttatgatattgatttggaccctgaaacagaacaggtgaatggattattctaaacagatcaccatccatcttcaagaagctactttgaaagtctggccagtgtctattcaggcccactgggagttaggaagtataagtaagccaagagaagtcagcccctgcccagaagatctgaaactaatagtaggagtttccccagaagtcattttcagccttaattctcatcatgtataaattaacataaatcatgcatgtctgtttactttagtgacgttccacagaataaaaggaaacaagtttgcca

SEQ ID NO: 6838 - DNA, 1855 bp, Homo sapiens
  misc_feature (1)..(1855): n=a,t,g or c
tgcattgcaccaggatgtctgtgaaatggacttcagtaattttgctaatacaactgagcttttgctttagctctgggaattgtggaaaggtgctggtgtgggcagcagaatacagccattggatgaatataaagacaatcctggatgagcttattcagagaggtcatgaggtgactgtactggcatcttcagcttccattctttttgatcccaacaactcatccgctcttaaaattgaaatttatcccacatctttaactaaaactgagttggagaatttcatcatgcaacagattaagagatggtcagaccttccaaaagatacattttggttatatttttcacaagtacaggaaatcatgtcaatatttggtgacataactagaaagttctgtaaagatgtagtttcaaataagaaatttatgaaaaaagtacaagagtcaagatttgacgtcatttttgcagatgctatttttccctgtagtgagctgctggctgagctatttaacataccctttgtgtacagtctcagcttctctcctggctacacttttgaaaagcatagtggaggatttattttccctccttcctacgtacctgttgttatgtcagaattaactgatcaaatgactttcatggagagggtaaaaaatatgatctatgtgctttactttgacttttggttcgaaatatttgacatgaagaagtgggatcagttttatagtgaagttctaggaagacccactacgttatctgagacaatggggaaagctgacgtatggcttattcgaaactcctggaattttcagtttcctcatccactcttaccaaatgttgattttgttggaggactccactgcaaacctgccaaacccctgcctaaggaaatggaagactttgtacagagctctggagaaaatggtgttgtggtgttttctctggggtcaatggtcagtaacatgacagaagaaagggccaacgtaattgcatcagccctggcccagatcccacaaaaggttctgtggagatttgatgggaataaaccagataccttaggtctcaatactcggctgtataagtggataccccagaatgaccttctaggtcatccaaagaccagagcttttataactcatggtggagccaatggcatctacgaggcaatctaccatgggatccctatggtggggattccattgtttgccgatcaacctgataacattgctcacatgaaggccaggggagcagctgttagagtggacttcaacacaatgtcgagtacagacttgctgaatgcattgaagagagtaattaatgatccttcatataaagagaatgttatgaaattatcaagaattcaacatgatcaaccagtgaagcccctggatcgagcagtcttctggattgaatttgtcatgcgccacaaaggagctaaacaccttcgggttgcagcccacgacctcacctggttccagtaccactctttggatgtgattgggttcctgctggtctgtgtggcaactgtgatatttatcgtcacaaaatgttgtctgttttgtttctggaagtttgctagaaaagcaaagaagggaaaaaatgattagttatatctgagatttgaagctggaaaacctgataggtgagactacttcagtttattccagcaagaaagattgtgatgcaagatttctttcttcctgagacaaaaaaaaaaaaaagaaaaaaaaatcttttcaaaatttactttgtcaaataaaaatttgtttttcagagatttaccacccagttcatggttagaaatattttgtggcaatgaagaaaacactacggaaaataaaaaataagataaagcctt

SEQ ID NO: 6839 - DNA, 1238 bp, Homo sapiens; identical to SEQ ID NO: 6584
  misc_feature (1)..(1238): n=a,t,g or c

SEQ ID NO: 6840 - DNA, 2100 bp, Homo sapiens
  misc_feature (1)..(2100): n=a,t,g or c
ggcacgagctctctctctctctctctctctctctcgccgccatgacgctgcgcggcgccgtcttcgaccttgacggggtgctggcgctgccagcggtgttcggcgtcctcggccgcacggaggaggccctggcgctgcccagaggacttctgaatgatgctttccagaaagggggaccagagggtgccactacccggcttatgaaaggagagatcacactttcccagtggataccactcatggaagaaaactgcaggaagtgctccgagaccgctaaagtctgcctccccaagaatttctccataaaagaaatctttgacaaggcgatttcagccagaaagatcaaccgccccatgctccaggcagctctcatgctcaggaagaaaggattcactactgccatcctcaccaacacctggctggacgaccgtgctgagagagatggcctggcccagctgatgtgtgagctgaagatgcactttgacttcctgatagagtcgtgtcaggtgggaatggtcaaacctgaacctcagatctacaagtttctgctggacaccctgaaggccagccccagtgaggtcgtttttttggatgacatcggggctaatctgaagccagcccgtgacttgggaatggtcaccatcctggtccaggacactgacacggccctgaaagaactggagaaagtgaccggaatccagcttctcaataccccggcccctctgccgacctcttgcaatccaagtgacatgagccatgggtacgtgacagtaaagcccagggtccgtctgcattttgtggagctgggctggcctgctgtgtgcctctgccatggatttcccgagagttggtattcttggaggtaccagatccctgctctggcccaggcaggttaccgggtcctagctatggacatgaaaggctatggagagtcatctgctcctcccgaaatagaagaatattgcatggaagtgttatgtaaggagatggtaaccttcctggataaactgggcctctctcaagcagtgttcattggccatgactggggtggcatgctggtgtggtacatggctctcttctaccccgagagagtgagggcggtggccagtttgaatactcccttcataccagcaaatcccaacatgtcccctttggagagtatcaaagccaacccagtatttgattaccagctctacttccaagaaccaggagtggctgaggctgaactggaacagaacctgagtcggactttcaaaagcctcttcagagcaagcgatgagagtgttttatccatgcataaagtctgtgaagcgggaggactttttgtaaatagcccagaagagcccagcctcagcaggatggtcactgaggaggaaatccagttctatgtgcagcagttcaagaagtctggtttcagaggtcctctaaactggtaccgaaacatggaaaggaactggaagtgggcttgcaaaagcttgggacggaagatcctgattccggccctgatggtcacggcggagaaggacttcgtgctcgttcctcagatgtcccagcacatggaggactggattccccacctgaaaaggggacacattgaggactgtgggcactggacacagatggacaagccaaccgaggtgaatcagatcctcattaagtggctggattctgatgcccggaacccaccggtggtctcaaagatgtagaacgcagcgtagtgcccacgctcagcaggtgtgccatccttccacctgctggggcaccattcttagtatacagaggtggccttacacacatcttgcatggatggcagcattgttctgaaggggtttgcagaaaaaaaagattttctttacataaagtgaatcaaatttgacattattttagatcccagagaaatcaggtgtgattagttctccaggcatgaatgcatcgtccctttatctgtaagaacccttagtgtcctgtagggggacagaatggggtggccaggtggtgatttctctttgaccaatgcatagtttggcagaaaaatcagccgttcatttagaagaatcttagcagagattgggatgccttactcaataaagctaagatgac

SEQ ID NO: 6841 - DNA, 3934 bp, Homo sapiens
  misc_feature (1)..(3934): n=a,t,g or c
tccagtaaggagtcggggtcttccccagttttctcagccaggcggcggcggcgactggcaatgtttggcctcaaaagaaacgcggtaatcggactcaacctctactgtgggggggccggcttgggggccggcagcggcggcgccacccgcccgggagggcgacttttggctacggagaaggaggcctcggcccggcgagagatagggggaggggaggccggcgcggtgattggcggaagcgccggcgcaagccccccgtccaccctcacgccagactcccggagggtcgcgcggccgccgcccattggcgccgaggtccccgacgtcaccgcgacccccgcgaggctgcttttcttcgcgcccacccgccgcgcggcgccgcttgaggagatggaagccccggccgctgacgccatcatgtcgcccgaagaggagctggacgggtacgagccggagcctctcgggaagcggccggctgtcctgccgctgctggagttggtcggggaatctggtaataacaccagtacggacgggtcactaccctcgacgccgccgccagcagaggaggaggaggacgagttgtaccggcagtcgctggagattatctctcggtaccttcgggagcaggccaccggcgccaaggacacaaagccaatgggcaggtctggggccaccagcaggaaggcgctggagaccttacgacgggttggggatggcgtgcagcgcaaccacgagacggtcttccaaggcatgcttcggaaactggacatcaaaaacgaagacgatgtgaaatcgttgtctcgagtgatgatccatgttttcagcgacggcgtaacaaactggggcaggattgtgactctcatttcttttggtgcctttgtggctaaacacttgaagaccataaaccaagaaagctgcatcgaaccattagcagaaagtatcacagacgttctcgtaaggacaaaacgggactggctagttaaacaaagaggctgggatgggtttgtggagttcttccatgtagaggacctagaaggtggcatcaggaatgtgctgctggcttttgcaggtgttgctggagtaggagctggtttggcatatctaataagatagccttactgtaagtgcaatagttgacttttaaccaaccaccaccaccaccaaaaccagtttatgcagttggactccaagctgtaacttcctagagttgcaccctagcaacctagccagaaaagcaagtggcaagaggattatggctaacaagaataaatacatgggaagagtgctccccattgattgaagagtcactgtctgaaagaagcaaagttcagtttcagcaacaaacaaactttgtttgggaagctatggaggaggacttttagatttagtgaagatggtagggtggaaagacttaatttccttgttgagaacaggaaagtggccagtagccaggcaagtcatagaattgattacccgccgaattcattaatttactgtagtagtgttaagagaagcactaagaatgccagtgacctgtgtaaaagttacaagtaatagaactatgactgtaagcctcagtactgtacaagggaagcttttcctctctctaattagctttcccagtatacttcttagaaagtccaagtgttcaggacttttatacctgttatactttggcttggttccatgattcttactttattagcctagtttatcaccaataatacttgacggaaggctcagtaattagttatgaatatggatatcctcaattcttaagacagcttgtaaatgtatttgtaaaaattgtatatatttttacagaaagtctatttccttgaaacgaaggaagtatcgaatttacattagtttttttcatacccttttgaactttgcaacttccgtaattaggaacctgtttcttacagcttttctatgctaaactttgttctgttcagttctagagtgtatacagaacgaattgatgtgtaactgtatgcagactggttgtagtggaacaaatctgataactatgcaggtttaaattttcttatctgattttggtaagtattccttagataggttttctttgaaaacctgggattgagaggttgatgaatggaaattctttcacttcattatatgcaagttttcaataattaggtctaagtggagttttaaggttactgatgacttacaaataatgggctctgattgggcaatactcatttgagttccttccatttgacctaatttaactggtgaaatttaaagtgaattcatgggctcatctttaaagcttttactaaaagattttcagctgaatggaactcattagctgtgtgcatataaaaagatcacatcaggtggatggagagacatttgatcccttgtttgcttaataaattataaaatgatggcttggaaaagcaggctagtctaaccatggtgctattattaggcttgcttgttacacacacaggtctaagcctagtatgtcaataaagcaaatacttactgttttgtttctattaatgattcccaaaccttgttgcaagtttttgcattggcatctttggatttcagtcttgatgtttgttctatcagacttaaccttttatttcctgtccttccttgaaattgctgattgttctgctccctctacagatatttatatcaattcctacagctttcccctgccatccctgaactctttctagcccttttagattttggcactgtgaaacccctgctggaaacctgagtgaccctccctccccaccaagagtccacagacctttcatctttcacgaacttgatcctgttagcaggtggtaataccatgggtgctgtgacactaacagtcattgagaggtgggaggaagtcccttttccttggactggtatcttttcaactattgttttatcctgtctttgggggcaatgtgtcaaaagtcccctcaggaattttcagaggaaagaacattttatgaggctttctctaaagtttcctttgtataggagtatgctcacttaaatttacagaaagaggtgagctgtgttaaacctcagagtttaaaagctactgataaactgaagaaagtgtctatattggaactagggtcatttgaaagcttcagtctcggaacatgacctttagtctgtggactccatttaaaaataggtatgaataagatgactaagaatgtaatggggaagaactgccctgcctgcccatctcagagccataaggtcatctttgctagagctatttttacctatgtatttatcgttcttgatcataagccgcttatttatatcatgtatctctaaggacctaaaagcactttatgtagtttttaattaatcttaagatctggttacggtaactaaaagcctgtctgccaaatccagtggaaacaagtgcatagatgtgaattggtttttaggggccccacttcccaattcattaggtatgactgtggaaatacagacaaggacttagttgatattttgggcttggggcagtgagggcttaggacaccccaagtggtttgggaaaggaggagggagtggtgggtttataggggaggaggaggcaggtggtctaagtgctgactggctacgtagttcgggcaaatcctccaaaagggaaagggaggatttgcttagaaggatggggctcccagtgactactttttgacttctgtttgtcttacgcttctctcagggaaaaacatgcagtcctctagtgtttcatgtacattctgtggggggtgaacaccttggttctggttaaacagctgtacttttgatagctgtgccaggaagggttaggaccaactacaaattaatgttggttgtcaaatgtagtgtgtttccctaactttctgtttttcctgagaaaaaaaaataaatcttttattcaaataaa

SEQ ID NO: 6842 - DNA, 855 bp, Homo sapiens
  misc_feature (1)..(855): n=a,t,g or c
gcatacgcagatatatgattgaaaatcactttgtgacatctcatttgctgataatgaaatgccaatgactgttaccttgtataaaaaaccaaatatgcgtgttagaagtgctgtcattttactcaaaatacacagatttgaaagtttgtcactgtttctgttctcaattgtcctttctccacatctagctcaagactgcagtgcagatgacgacaacttccttgtgcccattgcggtgggagctgccttggcaggagtacttattctagtgttgctggcttattttattggtctcaagcaccatcatgctggatatgagcaattttagaatctgcaacctgattgattatataaaaatacatgcaaataacaagattttcttacctctcagttgttgaaacactttgcttcttaaaattgatatgttgaaactttaattcttttatcaatcccagcattttgagatcagtctttattaataaaacctgttctctttaatcagcttaaaatccaaagtgtcatatttactggtcctggagacaaacttgttcaaaagaacatcaacgtgcaatgttttaagggtctatcttaaccaagccctggccaaattttgacctaacttgaagtatccttgaacttattaacatggccattataagaataaaatatgtagttgtgtcttaatggaattaataaatgtcatttcactactggtgttctgtttcaatctataaggactatagtgatttaaactcatcaatgtgcctttgcataaagttcattaaataaatattgatgtggtataaatgcccatcagatatgcttaaacttggttttcagttgaatgaagtagag

SEQ ID NO: 6843 - DNA, 1792 bp, Homo sapiens; identical to SEQ ID NO: 138
  misc_feature (1)..(1792): n=a,t,g or c

SEQ ID NO: 6844 - DNA, 4957 bp, Homo sapiens
  misc_feature (1)..(4957): n=a,t,g or c
gaccgaacacgttctttaggctccagcaaagcgccccactcggcgggtcggtgccgccgggtcccaggtgcccgctacttcccagaactcgcctcccgctccgggccctcgaaccagcgcggacaccacaatggaccgggcgtccgagctgctcttctacgtgaacggccgcaaggtgatagaaaaaaatgtcgatcctgaaacaatgctgttgccttatttgaggaagaagcttcgactcacaggaactccgtatggctgtggaggaggaggctgtggtgcttgtacagtgatgatatcacgatacaaccccatcaccaagaggataaggcatcacccagccaatgcctgtctgattcccatctgttctctgtatggtgctgccgtcaccacagtagaaggcataggaagcacccacaccagaattcatcctgttcaggagaggattgccaagtgtcatggcacccagtgtggcttctgcacacctgggatggtgatgtccatctaccccctgctcaggaaccacccagagcccactctggatcagttaactgatgcccttggtggtaacctgtgccgttgccatggatacaggcccataattgatgcatgcaagactttctgtaaaacttcgggctgctgtcaaagtaaagaaaatggggtttgctgtttggatcaaggaatcaatggattgccagaatttgaggaaggaagtaagacaagtccaaaactcttcgcagaagaggagtttctgccattggatccaacccaggaactgatatttcctcctgagctaatgataatggctgataaacagtcgcaaaggaccagggtgtttggcagtgagagaatgatgtggttttcccccgtgaccctgaaggacctgctggaatttaaattcaagtatccccaggctcctgttatcatgggaaacacctctgtggggcctgaagtgaaatttaaaggcgtctttcacccaggttataattctcctgatagaattgaagaacctgagtgttgtaaaccatgcatatatggactcacccttggtgctggtctcagcctagcccaggtgaaggacattttggctgatgtagtccagaagcttccagaggagaagacacagatgtaccatgctctcctgaagcatttgggaactctggctgggtcccagatcaggaacatggcttctttagggggacacatcattagcaggcatccagattcagatctgaatcccatcctggctgtgggtaactgtaccctcaacttgctatcaaaagaaggaaaacgacagattcctttaaatgagcaattcctcagcaagtgccctaatgcagatcttaagcctcaagaaatcttggtctcagtgaacatccccatctcaaggaagtgggaatttgtgtcagccttccgacaagcccagcgacaggagaatgcgctagcgatagtcaattcaggaatgagagtcttttttggagaaggggatggcattattagagagttatgcatctcatatggaggcgttggtccagccaccatctgtgccaagaattcctgccagaaactcattggaaggcactggaacgaacagatgctggatatagcctgcaggcttattctgaatgaagtctcccttttgggctcggcgccaggtgggaaagtggagttcaagaggactctcatcatcagcttcctcttcaagttctacctggaagtgtcacagattttgaaaaagatggatccagttcactatcctagccttgcagacaagtatgaaagtgctttagaagatcttcattccaaacatcactgcagtacattaaagtaccagaatataggcccaaagcagcatcctgaagacccaattggccaccccatcatgcatctgtctggtgtgaagcatgccacgggggaggccatctactgtgatgacatgcctctggtggaccaggaacttttcttgacttttgtgactagttcaagagctcatgctaagattgtgtctattgatctgtcagaagctctcagcatgcccggtgtggtggacatcatgacagcagaacatcttagtgacgtcaactccttctgcttttttactgaagctgagaaatttctggcgacagataaggtgttctgtgtgggtcagcttgtctgtgctgtgcttgccgattctgaggttcaggcaaagcgagctgctaagcgagtgaagattgtctatcaagacttggagccgctgatactaacaattgaggaaagtatacaacacaactcctccttcaagccagaaaggaaactggaatatggaaatgttgacgaagcatttaaagtggttgatcaaattcttgaaggtgaaatacatatgggaggtcaagaacatttttatatggaaacccaaagcatgcttgtcgttcccaagggagaggatcaagaaatggatgtctacgtgtccacacagtttcccaaatatatacaggacattgttgcctcaaccttgaagctcccagctaacaaggtcatgtgccatgtaaggcgtgttggtggagcgtttggagggaaggtgttaaaaaccggaatcattgcagccgtcactgcatttgccgcaaacaaacatggccgtgcagttcgctgtgttctggaacgaggagaagacatgttaataactggaggccgccatccttaccttggaaagtacaaagctggattcatgaacgatggcagaatcttggccctggacatggagcattacagcaatgcaggcgcctccttggatgaatcattattcgtgatagaaatgggacttctgaaaatggacaatgcttacaagtttcccaatctccgctgccggggttgggcatgcagaaccaaccttccatccaacacagcttttcgtgggtttggctttcctcaggcagtgctgatcaccgaatcttgtatcacggaagttgcagccaaatgtggactatcccctgagaaggtgcgaatcataaacatgtacaaggaaattgatcaaacaccctacaaacaagagatcaatgccaagaacctaatccagtgttggagagaatgtatggccatgtcttcctactccttgaggaaagttgctgtggaaaagttcaatgcagagaattattggaagaagaaaggactggccatggtccccctgaagtttcctgttggccttgcgtcacgtgctgctggtcaggctgctgccttggttcacatttatcttgatggctctgtgctggtcactcacggtggaattgaaatggggcagggggtccacactaaaatgattcaggtggtcagccgtgaattaagaatgccaatgtcgaatgtccacctgcgtggaacaagcacagaaactgtccctaatgcaaatatctctggaggttctgtggtggcagatctcaacggtttggcagtaaaggatgcctgtcaaactcttctaaaacgcctcgaacccatcatcagcaagaatcctaaaggaacttggaaagactgggcacagactgcttttgatgaaagcattaacctttcagctgttggatacttcagaggttatgagtcagacatgaactgggagaaaggcgaaggccagcccttcgaatactttgtttatggagctgcctgttccgaggttgaaatagactgcctgacgggggatcataagaacatcagaacagacattgtcatggatgttggctgcagtataaatccagccattgacataggccagattgaaggtgcatttattcaaggcatgggactttatacaatagaggaactgaattattctccccagggcattctgcacactcgtggtccagaccaatataaaatccctgccatctgtgacatgcccacggagttgcacattgctttgttgcctccttctcaaaactcaaatactctttattcatctaagggtctgggagagtcgggggtgttcctggggtgttccgtgtttttcgctatccatgacgcagtgagtgcagcacgacaggagagaggcctgcatggacccttgacccttaatagtccactgaccccggagaagattaggatggcctgtgaagacaagttcacaaaaatgattccgagagatgaacctggatcctacgttccttggaatgtacccatctgaatcaaatgcaaacttctggagaaaacagagtgcctcttcccagatggcaatctgtcctatctctgtgctggaagatgctagatctgaaagacagagtttccacagttcagaaatcatcccacagtgttgcttttctctggagctgatttaaagtattccatttagatttgatagatatgcttaagcaatctataaatcattttcaatgttataaacactaattggtttcctctagggtgatattcgtcattactctgtctcttcaatccatccagctaaatggaataggtgatgacttggatgtgactcctacttggcttctatcaccaacagaaattataccatatagtgaaaggcaattttctaaataatttcattactaatatgaactgtgaagttgtcattttttcatttgtccttttctgctatcaccttcctcttgtcagaatgaatatagacacatgtatctaagtgggaccaaagaaaaaatagcgaactttcaccaaagttttcatgaaaacccaaaagctttaaaagttactatcaagaaattgaaaggaaacccacagaataggataaaatatttgtaaatcatatttgataaaagtcttgtaaccagatacataaagagctcttacaactcaataaaaggcaagtaatttaaaaataggcaaaagaattgctggatggtatggtagttctatttttagtttttaccctaactactctgacttgatcatttaacattctgtgtatgtaacaaaatatcacatgcataaatattatgtgtcaataaaattttttaatggg

SEQ ID NO: 6845 - DNA, 3829 bp, Homo sapiens
  misc_feature (1)..(3829): n=a,t,g or c
tcccactcggctcctcttacggagtcctcattccaccccccttgtttccgcattcatcctgagtggctggtgggaacgtgaaaagggagaggaaaaggcgcaagaagccagagagaggggtgtgggaaaagcgaaaacaggctgccaaatcaggggattccttccaatttaaaaaggaagtctgctgacgttagttagttaaatttaacatctttttatgtgtaacacttgactttggaagcaaaaatgaactttgcggagagagagggctctaagagatactgcattcaaacgaaacatgtggccattctctgtgcggtggtggtgggtgtaggattaatagtgggacttgccgtgggcttgaccagatcgtgtgactccagcggggacggcgggccgggcactgcgccagctccttcccacctgccttcttccacggccagcccctcaggtcctcctgcccaggaccaggacatctgcccggccagtgaggatgagagcggacagtggaaaaactttcgactgccggacttcgtcaacccagtccactacgacctgcacgtgaagcccctgttggaggaggacacctacacgggcaccgtgagcatctccatcaacctgagcgctcccacccggtacctgtggctgcacctccgggagaccaggatcacccggctcccggagctgaagaggccctctggggaccaggtgcaagtccggaggtgtttcgagtacaaaaagcaggagtacgtggtggtcgaggcggaggaagagcttacccccagcagtggagatggcctgtatctcctgaccatggagttcgccggctggctgaacggctccctcgtgggattttatagaaccacctacacggagaacggacgagtcaagagcatagtggccaccgatcatgaaccaacagatgccaggaaatcttttccttgttttgatgagcccaacaaaaaggcaacttatacaatatctatcacccatcccaaagaatacggagcactttcaaatatgccagtggcgaaagaagagtcagtggatgataaatggactcgaacaacttttgagaagtctgtccccatgagcacgtacctggtgtgctttgctgtacatcaatttgactctgtaaagagaatatcaaatagtggaaaacctcttacaatttatgtccagccagagcaaaagcacacagccgaatatgctgcaaacataactaaaagtgtgtttgattattttgaagaatactttgctatgaattattctcttcctaaattagataaaatcgctattccagattttggcactggtgccatggagaactggggactcatcacgtacagagaaacgaacctgctttatgaccctaaggaatcagcctcatcaaaccaacagagggtggccactgtggttgcccatgaacttgtgcatcagtggtttggaaatattgtgaccatggactggtgggaagacttgtggctaaatgaaggatttgcttctttctttgagtttctgggagtaaaccatgcagaaacagactggcaaatgcgtgaccaaatgttacttgaagatgtattacctgttcaagaggatgattctttgatgtcttcgcatccaattattgtgactgtgacaacccctgatgaaataacatctgtttttgatggaatatcctatagcaagggatcttctattttgagaatgcttgaagactggataaaaccagagaattttcaaaaaggatgtcagatgtacttggaaaaataccaattcaagaatgcaaaaacttctgatttttgggcagcactggaagaggcaagtaggctaccagtgaaagaagtaatggacacctggaccagacagatgggttatcctgtgcttaacgtgaacggtgtcaagaacatcacacagaaacgctttttgttggacccaagagctaacccttctcagcccccttcagatcttggttatacatggaatatcccagttaaatggactgaagataatataacaagcagtgtgttatttaataggtcagaaaaagaaggaatcactttgaactcctctaatcctagtggaaatgcttttctcaaaataaacccagatcatattgggttttatcgtgtaaattatgaagtagcaacttgggactcgatagctacagcgctctccttgaaccacaagacattttcttcagcagatcgtgcaagtcttattgatgatgcttttgccttggcaagagctcaacttctagattataaggtggctttgaacttgaccaagtatctcaaaagggaagagaattttttaccatggcagagagtaatttcagctgtaacctacatcattagcatgtttgaagatgataaagagctatatcctatgattgaggaatacttccaaggtcaagtgaagcctattgcagattctctgggatggaatgatgctggagaccatgtcacaaagttactccgttcctccgtgttagggtttgcgtgcaagatgggagacagagaagccttgaacaatgcttcctcgttatttgagcagtggctaaatgggactgtaagccttcccgtaaatctcaggcttctggtgtatcggtatgggatgcagaactctggcaatgagatttcatggaactacactcttgagcaataccagaaaacttcattagctcaagaaaaagaaaaactgctgtatggattagcatcagtgaagaacgttactcttttgtcaaggtatttggatttgctcaaggacacgaaccttattaaaactcaggatgtgtttacagtcattcgatatatctcatataacagctatgggaagaacatggcctggaattggatacaactcaactgggactatctagtcaacagatatacactcaataacagaaaccttggccgaattgtcacaatagcagagccattcaacactgaactgcaactgtggcagatggagagcttttttgcaaaatatccacaagctggagcaggagaaaaacctagggaacaagtgctggaaacagtgaaaaacaatatagagtggctaaaacaacatagaaacaccatcagagaatggttttttaatttacttgagagtggttaatgtattcaaatgttagagtttaattttgtgaatctattgtttctcctctgaagcatttggtggcctaatttacaagcacgatggagagagccttataaacagataatgcttttactaagcactgtgtttatatgtcttgcaaagcctttaaattgttcctctttgtttatgaagaaagatactaatagagtacttaatatactcagggattccttctaagtgtacttcataagatattctttacaaactgaagataatgaaatagttattttaatacctttaaatatcattctttgtatcttaaatctgtgaagtagaacaatttggtcttagctttacattttcagtaccaaagaaacaccacttaatcttctctcttgattgatttttaaagtttaaataccagtacttgagggaccaatattaccatcttaatctttattttattattcagaattatacagacctaatatcattttattcacatatgtcttactactttaaatcctaccaaagtaacctgggcttaagttttacttgaggatcatatgaattagccaaaagaatggctgactgttgcctttactcttataaaatcaataagagaactctcctctttttttaaaaataaatctaaatgattatcttgaaaaagtattgttttccagtgtcacttgactcttgaataaaaataactgcagtgttcccc

SEQ ID NO: 6846 - DNA, 1381 bp, Homo sapiens
  misc_feature (1)..(1381): n=a,t,g or c
tgggtgttggaggctttaaggtagctttaaattcgtgttgtcctgggagctcgcccttttcggctggagtcgggctttacggcgccggatggctctggacgtgaagtctcgggcaaagcgttatgagaagctggacttccttggggagggacagtttgccaccgtttacaaggccagagataagaataccaaccaaattgtcgccattaagaaagagtctctgctggtagccactacagctgtgaatgtgctgtgtcatacctgaagccaatatgtctcggagtttcacctgaggcccatgatcaaacttggacatagatcagaagctaaagatggtataaatagaaccgccttaagagagataaaattattacaggagctaagtcatccaaatataattggtctccttgatgcttttggacataaatctaatattagccttgtctttgattttatggaaactgatctagaggttataataaaggataatagtcttgtgctgacaccatcacacatcaaagcctacatgttgatgactcttcaaggattagaatatttacatcaacattggatcctacatagggatctgaaaccaaacaacttgttgctagatgaaaatggagttctaaaactggcagattttggcctggccaaatcttttgggagccccaatagagcttatacacatcaggttgtaaccaggtggtatcgggcccccgagttactatttggagctaggatgtatggtgtaggtgtggacatgtgggctgttggctgtatattagcagagttacttctaagggttccttttttgccaggagattcagaccttgatcagctaacaagaatatttgaaactttgggcacaccaactgaggaacagtggccggacatgtgtagtcttccagattatgtgacatttaagagtttccctggaatacctttgcatcacatcttcagtgcagcaggagacgacttactagatctcatacaaggcttattcttatttaatccatgtgctcgaattacggccacacaggcactgaaaatgaagtatttcagtaatcggccagggccaacacctggatgtcagctgccaagaccaaactgtccagtggaaaccttaaaggagcaatcaaatccagctttggcaataaaaaggaaaagaacagaggccttagaacaaggaggattgcccaagaaactaattttttaaagagaacactggacaacattttactactgagggaaatagccaaaaaggcaaataatggaaaaatagtaaacattaagtaaatgctgtagaagtgagtttgtaaatattctacacatgtaaaatatgtaaaactatgggttatttttattaaatgtattttaaaaa

SEQ ID NO: 6847 - DNA, 4484 bp, Homo sapiens
  misc_feature (1)..(4484): n=a,t,g or c
tgcccaggaggagtaggagcaggagcagaagcagaagcggggtccggagctgcgcgcctacgcgggacctgtgtccgaaatgccggtgcgaggagaccgcgggtttccaccccggcgggagctgtcaggttggctccgcgccccaggcatggaagagctgatatgggaacagtacactgtgaccctacaaaaggattccaaaagaggatttggaattgcagtgtccggaggcagagacaacccccactttgaaaatggagaaacgtcaattgtcatttctgatgtgctcccgggtgggcctgctgatgggctgctccaagaaaatgacagagtggtcatggtcaatggcacccccatggaggatgtgcttcattcgtttgcagttcagcagctcagaaaaagtgggaaggtcgctgctattgtggtcaagaggccccggaaggtccaggtggccgcacttcaggccagccctcccctggatcaggatgaccgggcttttgaggtgatggacgagtttgatggcagaagtttccggagtggctacagcgagaggagccggctgaacagccatggggggcgcagccgcagctgggaggacagcccggaaagggggcgtccccatgagcgggcccggagccgggagcgggacctcagccgggaccggagccgtggccggagcctggagcggggcctggaccaagaccatgcgcgcacccgagaccgcagccgtggccggagcctggagcggggcctggaccacgactttgggccatcccgggaccgggaccgtgaccgcagccgcggccggagcattgaccaggactacgagcgagcctatcaccgggcctacgacccagactacgagcgggcctacagcccggagtacaggcgcggggcccgccacgatgcccgctctcggggaccccgaagccgcagccgcgagcacccgcactcacggagccccagccccgagcctagggggcggccggggcccatcggggtcctcctgatgaaaagcagagcgaacgaagagtatggtctccggcttgggagtcagatcttcgtaaaggaaatgacccgaacgggtctggcaactaaagatggcaaccttcacgaaggagacataattctcaagatcaatgggactgtaactgagaacatgtctttaacggatgctcgaaaattgatagaaaagtcaagaggaaaactacagctagtggtgttgagagacagccagcagaccctcatcaacatcccgtcattaaatgacagtgactcagaaatagaagatatttcagaaatagagtcaacccgatcattttctccagaggagagacgtcatcagtattctgattatgattatcattcctcaagtgagaagctgaaggaaaggccaagttccagagaggacacgccgagcagattgtccaggatgggtgcgacacccactccctttaagtccacaggggatattgcaggcacagttgtcccagagaccaacaaggaacccagataccaagaggaacccccagctcctcaaccaaaagcagccccgagaacttttcttcgtcctagtcctgaagatgaagcaatatatggccctaataccaaaatggtaaggttcaagaagggagacagcgtgggcctccggttggctggtggcaatgatgtcgggatatttgttgctggcattcaagaagggacctcggcggagcaggagggccttcaagaaggagaccagattctgaaggtgaacacacaggatttcagaggattagtgcgggaggatgccgttctctacctgttagaaatccctaaaggtgaaatggtgaccattttagctcagagccgagccgatgtgtatagagacatcctggcttgtggcagaggggattcgttttttataagaagccactttgaatgtgagaaggaaactccacagagcctggccttcaccagaggggaggtcttccgagtggtagacacactgtatgacggcaagctgggcaactggctggctgtgaggattgggaacgagttggagaaaggcttaatccccaacaagagcagagctgaacaaatggccagtgttcaaaatgcccagagagacaacgctggggaccgggcagatttctggagaatgcgtggccagaggtctggggtgaagaagaacctgaggaaaagtcgggaagacctcacagctgttgtgtctgtcagcaccaagttcccagcttatgagagggttttgctgcgagaagctggtttcaagagacctgtggtcttattcggccccatagctgatatagcaatggaaaaattggctaatgagttacctgactggtttcaaactgctaaaacggaaccaaaagatgcaggatctgagaaatccactggagtggtccggttaaataccgtgaggcaagttattgaacaggataagcatgcactactggatgtgactccgaaagctgtggacctgttgaattacacccagtggttctcaattgtgatttctttcacgccagactccagacaaggtgtcaacaccatgagacaaaggttagacccaacgtccaacaatagttctcgaaagttatttgatcacgccaacaagcttaaaaaaacgtgtgcacacctttttacagctacaatcaacctaaattcagccaatgatagctggtttggcagcttaaaggacactattcagcatcagcaaggagaagcggtttgggtctctgaaggaaagatggaagggatggatgatgaccccgaagaccgcatgtcctacttaactgccatgggcgcagactatctgagttgcgacagccgcctcatcagtgactttgaagacacggacggtgaaggaggcgcctacactgacaatgagctggatgagccagccgaggagccgctggtgtcgtccatcacccgctcctcggagccggtgcagcacgaggagagcataaggaaacccagcccagagccacgagctcagatgaggagggctgctagcagcgatcaacttagggacaatagcccgcccccagcattcaagccagagccgtccaaggccaaaacccagaacaaagaagaatcctatgacttctccaaatcctatgaatataagtcaaacccctctgccgttgctggtaatgaaactcctggggcatctaccaaaggttatcctcctcctgttgcagcaaaacctacctttgggcggtctatactgaagccctccactcccatccctcctcaagagggtgaggaggtgggagagagcagtgaggagcaagataatgctcccaaatcagtcctgggcaaagtcaaaatatttggagaagatggatcacaagggccagggttacaagagaatgcaggagctccaggaagcacagaatgcaaggatcgaaattgcccagaagcatcctgatatctatgcagttccaatcaaaacgcacaagccagaccctggcacgccccagcacacgagttccagaccccctgagccacagaaagctccttccagaccttatcaggataccagaggaagttatggcagtgatgccgaggaggaggagtaccgccagcagctgtcagaacactccaagcgcggttactatggccagtctgcccgataccgggacacagaattatagatgtctgagcacggactctcccaggcctgcctgcatggcatcagactagccactcctgccaggccgccgggatggttcttctccagttagaatgcaccatggagacgtggtgggactccagctcgtgtgtcctcatggagaacccaggggacagctggtgcaaattcagaactgagggctctgtttgtgggactgggttagaggagtctgtggctttttgttcagaattaagcagaacactgcagtcagatcctgttacttgcttcagtggaccgaaatctgtattctgtttgcgtacttgtaatatgtatattaagaagcaataactatttttcctcattaatagctgccttcaaggactgtttcagtgtgagtcagaatgtgaaaaaggaataaaaaatactgttgggctcaaactaaattcaaagaagtactttattgcaactcttttaagtgccttggatgagaagtgtcttaaattttcttcctttgaagctttaggcagagccataatggactaaaacattttgactaagtttttataccagcttaatagctgtagttttccctgcactgtgtcatcttttcaaggcatttgtctttgtaatattttccataaatttggactgtctatatcataactatacttgatagtttggctataagtgctcaatagcttgaagcccaagaagttggtatcgaaatttgttgtttgtttaaacccaagtgctgcacaaaagcagatacttgaggaaaacactatttccaaaagcacatgtattgacaacagttttataatttaataaaaaggaatacattgcaatccgt

SEQ ID NO: 6848 - DNA, 1008 bp, Homo sapiens
  misc_feature (1)..(1008): n=a,t,g or c
aattcggtaccccgtagcgaccggcgctcagctggaattcgggggaagttgctggctgactgggcttgcgaggaaaccgcctcggagctgcagcgaaggccaaggaatcactgaagatcggcgagggaggacagggggttcatcatgggtggctttttctcaagtatattttccagtctgtttggaactcgggaaatgagaattttaattttgggattagatggagcaggaaaaaccacaattttgtacagattacaagtgggagaagttgttactactatacctaccattggatttaatgtagagacggtgacgtacaaaaaccttaaattccaagtctgggatttaggaggacagacaagtatcaggccatactggagatgttactattcaaacacagatgcagtcatttatgtagtagacagttgtgaccgagaccgaattggcatttccaaatcagagttagttgccatgttggaggaagaagagctgagaaaagccattttagtggtgtttgcaaataaacaggacatggaacaggccatgacttcctcagagatggcaaattcacttgggttacctgccttgaaggaccgaaaatggcagatattcaaaacgtcagcaaccaaaggcaccggccttgatgaggcaatggaatggttagttgaaacattaaaaagcagacagtaattcagtccattcttctcccctgaaatgaagactacatcacctctctccctttggaaacagtcaagtgtacttcacactactagatgttaaaactatatgattattggcatatactgactgactgcaatatttgtagtaaatagggaaaataagtatttagttggagggataatttgatcgaatcacctgaatgttctatgtaatgtaaaatattcttttcttgctttcttgtgttaaggtatatattctatttgtatggaattcttattcaaatacagttgtattaaagagtatactcctattggatgaaaaaaacct

SEQ ID NO: 6849 - DNA, 1834 bp, Homo sapiens; identical to SEQ ID NO: 6286
  misc_feature (1)..(1834): n=a,t,g or c

SEQ ID NO: 6850 - DNA, 2518 bp, Homo sapiens; identical to SEQ ID NO: 699
  misc_feature (1)..(2518): n=a,t,g or c

SEQ ID NO: 6851 - DNA, 2482 bp, Homo sapiens; identical to SEQ ID NO: 6587
  misc_feature (1)..(2482): n=a,t,g or c

SEQ ID NO: 6852 - DNA, 2806 bp, Homo sapiens; identical to SEQ ID NO: 1428
  misc_feature (1)..(2806): n=a,t,g or c

SEQ ID NO: 6853 - DNA, 1549 bp, Homo sapiens; identical to SEQ ID NO: 6588
  misc_feature (1)..(1549): n=a,t,g or c

SEQ ID NO: 6854 - DNA, 4656 bp, Homo sapiens; identical to SEQ ID NO: 6589
  misc_feature (1)..(4656): n=a,t,g or c

SEQ ID NO: 6855 - DNA, 2353 bp, Homo sapiens; identical to SEQ ID NO: 6590
  misc_feature (1)..(2353): n=a,t,g or c

SEQ ID NO: 6856 - DNA, 6378 bp, Homo sapiens; identical to SEQ ID NO: 709
  misc_feature (1)..(6378): n=a,t,g or c

SEQ ID NO: 6857 - DNA, 4910 bp, Homo sapiens
  misc_feature (1)..(4910): n=a,t,g or c
tagacgcaccctctgaagatggtgactccctcctgagaagctggaccccttggtaaaagacaaggccttctccaagaagaatatgaaagtgttactcagacttatttgtttcatagctctactgatttcttctctggaggctgataaatgcaaggaacgtgaagaaaaaataattttagtgtcatctgcaaatgaaattgatgttcgtccctgtcctcttaacccaaatgaacacaaaggcactataacttggtataaagatgacagcaagacacctgtatctacagaacaagcctccaggattcatcaacacaaagagaaactttggtttgttcctgctaaggtggaggattcaggacattactattgcgtggtaagaaattcatcttactgcctcagaattaaaataagtgcaaaatttgtggagaatgagcctaacttatgttataatgcacaagccatatttaagcagaaactacccgttgcaggagacggaggacttgtgtgcccttatatggagttttttaaaaatgaaaataatgagttacctaaattacagtggtataaggattgcaaacctctacttcttgacaatatacactttagtggagtcaaagataggctcatcgtgatgaatgtggctgaaaagcatagagggaactatacttgtcatgcatcctacacatacttgggcaagcaatatcctattacccgggtaatagaatttattactctagaggaaaacaaacccacaaggcctgtgattgtgagcccagctaatgagacaatggaagtagacttgggatcccagatacaattgatctgtaatgtcaccggccagttgagtgacattgcttactggaagtggaatgggtcagtaattgatgaagatgacccagtgctaggggaagactattacagtgtggaaaatcctgcaaacaaaagaaggagtaccctcatcacagtgcttaatatatcggaaattgaaagtagattttataaacatccatttacctgttttgccaagaatacacatggtatagatgcagcatatatccagttaatatatccagtcactaatttccagaagcacatgattggtatatgtgtcacgttgacagtcataattgtgtgttctgttttcatctataaaatcttcaagattgacattgtgctttggtacagggattcctgctatgattttctcccaataaaagcttcagatggaaagacctatgacgcatatatactgtatccaaagactgttggggaagggtctacctctgactgtgatatttttgtgtttaaagtcttgcctgaggtcttggaaaaacagtgtggatataagctgttcatttatggaagggatgactacgttggggaagacattgttgaggtcattaatgaaaacgtaaagaaaagcagaagactgattatcattttagtcagagaaacatcaggcttcagctggctgggtggttcatctgaagagcaaatagccatgtataatgctcttgttcaggatggaattaaagttgtcctgcttgagctggagaaaatccaagactatgagaaaatgccagaatcgattaaattcattaagcagaaacatggggctatccgctggtcaggggactttacacagggaccacagtctgcaaagacaaggttctggaagaatgtcaggtaccacatgccagtccagcgacggtcaccttcatctaaacaccagttactgtcaccagccactaaggagaaactgcaaagagaggctcacgtgcctctcgggtagcatggagaagttgccaagagttctttaggtgcctcctgtcttatggcgttgcaggccaggttatgcctcatgctgacttgcagagttcatggaatgtaactatatcatcctttatccctgaggtcacctggaatcagattattaagggaataagccatgacgtcaatagcagcccagggcacttcagagtagagggcttgggaagatcttttaaaaaggcagtaggcccggtgtggtggctcacgcctataatcccagcactttgggaggctgaagtgggtggatcaccagaggtcaggagttcgagaccagcccagccaacatggcaaaaccccatctctactaaaaatacaaaaatgagctaggcatggtggcacacgcctgtaatcccagctacacctgaggctgaggcaggagaattgcttgaaccggggagacggaggttgcagtgagccgagtttgggccactgcactctagcctggcaacagagcaagactccgtctcaaaaaaagggcaataaatgccctctctgaatgtttgaactgccaagaaaaggcatggagacagcgaactagaagaaagggcaagaaggaaatagccaccgtctacagatggcttagttaagtcatccacagcccaagggcggggctatgccttgtctggggaccctgtagagtcactgaccctggagcggctctcctgagaggtgctgcaggcaaagtgagactgacacctcactgaggaagggagacatattcttggagaactttccatctgcttgtattttccatacacatccccagccagaagttagtgtccgaagaccgaattttattttacagagcttgaaaactcacttcaatgaacaaagggattctccaggattccaaagttttgaagtcatcttagctttccacaggagggagagaacttaaaaaagcaacagtagcagggaattgatccacttcttaatgctttcctccctggcatgaccatcctgtcctttgttattatcctgcattttacgtctttggaggaacagctccctagtggcttcctccgtctgcaatgtcccttgcacagcccacacatgaaccatccttcccatgatgccgctcttctgtcatcccgctcctgctgaaacacctcccaggggctccacctgttcaggagctgaagcccatgctttcccaccagcatgtcactcccagaccacctccctgccctgtcctccagcttcccctcgctgtcctgctgtgtgaattcccaggttggcctggtggccatgtcgcctgcccccagcactcctctgtctctgctcttgcctcgacccttcctcctcctttgcctaggaggccttctcgcattttctctagctgatcagaattttaccaaaattcagaacatcctccaattccacagtctctgggagactttccctaagaggcgacttcctctccagccttctctctctggtcaggcccactgcagagatggtggtgagcacatctgggaggctggtctccctccagctggaattgctgctctctgagggagaggctgtggtggctgtctctgtccctcactgccttccaggagcaatttgcacatgtaacatagatttatgtaatgctttatgtttaaaaacattccccaattatcttatttaatttttgcaattattctaattttatatatagagaaagtgacctattttttaaaaaaatcacactctaagttctattgaacctaggacttgagcctccatttctggcttctagtctggtgttctgagtacttgatttcaggtcaataacggtcccccctcactccacactggcacgtttgtgagaagaaatgacattttgctaggaagtgaccgagtctaggaatgcttttattcaagacaccaaattccaaacttctaaatgttggaattttcaaaaattgtgtttagattttatgaaaaactcttctactttcatctattctttccctagaggcaaacatttcttaaaatgtttcattttcattaaaaatgaaagccaaatttatatgccaccgattgcaggacacaagcacagttttaagagttgtatgaacatggagaggacttttggtttttatatttctcgtatttaatatgggtgaacaccaacttttatttggaataataattttcctcctaaacaaaaacacattgagtttaagtctctgactcttgcctttccacctgctttctcctgggcccgctttgcctgcttgaaggaacagtgctgttctggagctgctgttccaacagacagggcctagctttcatttgacacacagactacagccagaagcccatggagcagggatgtcacgtcttgaaaagcctattagatgttttacaaatttaattttgcagattattttagtctgtcatccagaaaatgtgtcagcatgcatagtgctaagaaagcaagccaatttggaaacttaggttagtgacaaaattggccagagagtgggggtgatgatgaccaagaattacaagtagaatggcagctggaatttaaggagggacaagaatcaatggataagcgtgggtggaggaagatccaaacagaaaagtgcaaagttattccccatcttccaagggttgaattctggaggaagaagacacattcctagttccccgtgaacttcctttgacttattgtccccactaaaacaaaacaaaaaacttttaatgccttccacattaattagattttcttgcagtttttttatggcatttttttaaagatgccctaagtgttgaagaagagtttgcaaatgcaacaaaaatatttaattaccggttgttaaaactggtttagcacaatttatattttccctctcttgcctttcttatttgcaataaaaggtattgagccattttttaaatgacatttttgataaattatgtttgtactagttgatgaaggagttttttttaacctgtttatataattttgcagcagaagccaaattttttgtatattaaagcaccaaattcatgtacagcatgcatcacggatcaatagactgtacttattttccaataaaattttcaaactttgtactgttaaa

SEQ ID NO: 6858 - DNA, 899 bp, Homo sapiens
  misc_feature (1)..(899): n=a,t,g or c
ttttctttagattgggatgcttggaaggtgtgtctacgacttcgagataatggacttctggccaagccaacccatggcgacattatcaggtttgcgcctccgctggtgatcaaggaggatgagcttcgagagtccattgaaattattaacaagaccatcttgtctttctgagggtagccagctgttttcagtggtccctgggagccagctggagacaggtggtcctgtaaaagctttattcctaatgtgggcacattccactcccatgagtcttcaaaaactttttttttgaatatatttttttcagttgatacataatagaacaacgtttatgaacctgccgtttgctttgtaacgtaactaaataatgtaatggcatctatattcagttgaagtgttttgatgtgcatgtgtacttcctaaggtgaaatgcatctatatacagacagcctctaaatcaagtccttcagtataattgatatatgtttttataatttcctcactggtataagtgtttcatatttgaaaaagttatctctgggtattgcataaaaggcttcatcttataaagtgaaatcattgttattgaattttaggaaggattaatggttaagtgtatataaaatactaatattaagtaaacttcatattggccaacaccagggttgtattctatggatgtcattattttgaattaagaattagtgtttaacattcctaaattgttttgagtgcttgattataatttgtaaaaaatgtttattttcaatacttctttaaatttaaaataaagcttatatttcaaatgtctgttttgtgatgattattcaccttaaaaggaagaagctgaggcaaaattaatatagaatgtttaggtgggccaaggttggggagctgca

SEQ ID NO: 6859 - DNA, 1104 bp, Homo sapiens; identical to SEQ ID NO: 715
  misc_feature (1)..(1104): n=a,t,g or c

SEQ ID NO: 6860 - DNA, 1677 bp, Homo sapiens
  misc_feature (1)..(1677): n=a,t,g or c
tgtcacccaggctggagtgcagtggcgcaatctcagctcactgcaacctccacctccctggttcaagcgattctcctgcctcctccgcccgacgccccgcgtcccccgccgcgccgccgccgccaccctctgcgccccgcgccgccccccggtcccgcccgccatgcccggcccggccgcgggcagcagggcccgggtctacgccgaggtgaacagtctgaggagccgcgagtactgggactacgaggctcacgtcccgagctggggtaatcaagatgattaccaactggttcgaaaacttggtcggggaaaatatagtgaagtatttgaggccattaatatcaccaacaatgagagagtggttgtaaaaatcctgaagccagtgaagaaaaagaagataaaacgagaggttaagattctggagaaccttcgtggtggaacaaatatcattaagctgattgacactgtaaaggaccccgtgtcaaagacaccagctttggtatttgaatatatcaataatacagattttaagcaactctaccagatcctgacagactttgatatccggttttatatgtatgaactacttaaagctctggattactgccacagcaagggaatcatgcacagggatgtgaaacctcacaatgtcatgatagatcaccaacagaaaaagctgcgactgatagattggggtctggcagaattctatcatcctgctcaggagtacaatgttcgtgtagcctcaaggtacttcaagggaccagagctcctcgtggactatcagatgtatgattatagcttggacatgtggagtttgggctgtatgttagcaagcatgatctttcgaagggaaccattcttccatggacaggacaactatgaccagcttgttcgcattgccaaggttctgggtacagaagaactgtatgggtatctgaagaagtatcacatagacctagatccacacttcaacgatatcctgggacaacattcacggaaacgctgggaaaactttatccatagtgagaacagacaccttgtcagccctgaggccctagatcttctggacaaacttctgcgatacgaccatcaacagagactgactgccaaagaggccatggagcacccatacttctaccctgtggtgaaggagcagtcccagccttgtgcagacaatgctgtgctttccagtggtctcacggcagcacgatgaagactggaaagcgacgggtctgttgcggttctcccacttttccataagcagaacaagaaccaaatcaaacgtcttaacgcgtatagagagatcacgttccgtgagcagacacaaaacggtggcaggtttggcgagcacgaactagaccaagcgaagggcagcccaccaccgtatatcaaacctcacttccgaatgtaaaaggctcacttgcctttggcttcctgttgacttcttcccgacccagaaagcatggggaatgtgaagggtatgcagaatgttgttggttactgttgctccccgagcccctcaactcgtcccgtggccgcctgtttttccagcaaaccacgctaactagctgaccacagactccacagtggggggacgggcgcagtatgtggcatggcggcagttacatattattattttaaaagtatatattattgaataaaaggttttaaaag

SEQ ID NO: 6861 - DNA, 2134 bp, Homo sapiens
  misc_feature (1)..(2134): n=a,t,g or c
acccaagccagcactggctcatactgattcattttgatctctgctaataccagagtcctgcgtggcagagccattggcaccagaaattacaagagaacatggccaagcgagttgccattgtgggagctggggtcagcggcctggcctccatcaagtgctgtctggaagaaggactggagcccacctgctttgagaggagcgatgaccttggggggctgtggagattcaccgaacatgttgaagaaggcagagccagtctctacaagtctgtggtttccaacagctgcaaggagatgtcttgttactcagactttccattcccagaagattatccaaactatgtgccaaattctcaattcctggaatatctcaaaatgtatgcaaaccactttgaccttctgaaacacattcaattcaagaccaaagtctgcagtgtaacaaaatgctcagattctgctgtctctggccaatgggaggtggtcactatgcatgaagagaagcaagagtcagccatctttgatgctgtcatggtctgcactggctttcttactaatccttatttgccactggattcctttccaggtattaatgcctttaaaggccagtactttcatagccggcaatataagcatccagatatatttaaggacaagagagtccttgtgattggaatgggaaattctggcacagacattgctgtggaggccagccacctggcggaaaaggtgttcctcagcaccaccggagggggatgggtgatcagccgaatctttgactcgggctacccatgggacatggtgttcatgacacgctttcagaacatgttgagaaattccctcccaaccccaattgtgacttggttgatggagcgaaagataaacaactggctcaatcatgcaaattacggcttaataccagaagacaggactcagctgaaagagtttgtgctaaatgatgagctcccaggacgcatcatcactgggaaagtgttcatcaggccaagcataaaagaggtaaaggaaaactctgtcatatttaacaatacttcaaaggaagagcctattgacatcattgtctttgccactggatacacatttgctttccccttccttgatgagtctgtagtgaaagttgaagatggccaggcctcactgtacaagtatatcttccctgcacatctgcaaaagccaaccctggccattattggcctcatcaaacccttgggctccatgatacctacaggagaaacacaagctcggtgggctgttcgagtcctgaaaggtgtaaataagttaccaccaccaagtgtcatgatagaggaaattaatgcaaggaaagaaaacaagcccagttggtttggcttgtgctactgcaaggctttacaatcagattatatcacatacatagatgaactcctgacctatatcaatgcaaaacccaacctgttctctatgctcctaacggatccacatctggctctgaccgtcttctttggcccatgctcaccataccagttccgcttgactggcccaggaaaatgggaaggagccagaaatgccatcatgacccagtgggaccgaacattcaaggtcatcaaagctcgagttgtacaagagtctccatctccctttgaaagttttcttaaagtctttagctttctggctttgcttgtggctatttttctgattttcctataagtaaaagatctcctaaatggaagatgcacagagtagatttacaatgctccaattcctctcttacagcaatattgccttcacagttataaactgtattcaaatagtaaaggccaccctctcgcttccctggctggccccagggctaccactggtattcctgagcctctcccagctccacttctaatgctagagaatgataactaagacttctgtgcatttgaaggttgttggaaagttacaggttcattttagaaagaaagctgttcttgacagcactctgagccatcatacctctttcccatataaactattttcacagatctcaactaaaaccccttacttcacaaatgattgtgttgtgctgaaatggtgctcttatagtactggcttattaaaagtaaaaaataaacctaaaaattgattgttttaaaaaaaaa

SEQ ID NO: 6862 - DNA, 3829 bp, Homo sapiens
  misc_feature (1)..(3829): n=a,t,g or c
aaggatggcacagggctggtgccctcggagcgtgtcctggtggggccccagcggctgcaggtgctgaatgcctcccacgaggactccggggcctacagctgccggcagcggctcacgcagcgcgtactgtgccacttcagtgtgcgggtgacagacgctccatcctcgggagatgacgaagacggggaggacgaggctgaggacacaggtgtggacacaggggccccttactggacacggcccgagcggatggacaagaagctgctggccgtgccggccgccaacaccgtccgcttccgctgcccagccgctggcaaccccactccctccatctcctggctgaagaacggcagggagttccgcggcgagcaccgcattggaggcatcaagctgcggcatcagcagtggagcctggtcatggaaagcgtggtgccctcggaccgcggcaactacacctgcgtcgtggagaacaagtttggcagcatccggcagacgtacacgctggacgtgctggagcgctccccgcaccggcccatcctgcaggcggggctgccggccaaccagacggcggtgctgggcagcgacgtggagttccactgcaaggtgtacagtgacgcacagccccacatccagtggctcaagcacgtggaggtgaatggcagcaaggtgggcccggacggcacaccctacgttaccgtgctcaagacggcgggcgctaacaccaccgacaaggagctagaggttctctccttgcacaacgtcacctttgaggacgccggggagtacacctgcctggcgggcaattctattgggttttctcatcactctgcgtggctggtggtgctgccagccgaggaggagctggtggaggctgacgaggcgggcagtgtgtatgcaggcatcctcagctacggggtgggcttcttcctgttcatcctggtggtggcggctgtgaccgtctgccgcctgcgcagcccccccaagaaaggcctgggctcccccaccgtgcacaagatctcccgcttcccgctcaagcgacaggtgtccctggagtccaacgcgtccatgagctccaacacaccactggtgcgcatcgcaaggctgtcctcaggggagggccccacgctggccaatgtctccgagctcgagctgcctgccgaccccaaatgggagctgtctcgggcccggctgaccctgggcaagccccttggggagggctgcttcggccaggtggtcatggcggaggccatcggcattgacaaggaccgggccgccaagcctgtcaccgtagccgtgaagatgctgaaagacgatgccactgacaaggacctgtcggacctggtgtctgagatggagatgatgaagatgatcgggaaacacaaaaacatcatcaacctgctgggcgcctgcacgcagggcgggcccctgtacgtgctggtggagtacgcggccaagggtaacctgcgggagtttctgcgggcgcggcggcccccgggcctggactactccttcgacacctgcaagccgcccgaggagcagctcaccttcaaggacctggtgtcctgtgcctaccaggtggcccggggcatggagtacttggcctcccagaagtgcatccacagggacctggctgcccgcaatgtgctggtgaccgaggacaacgtgatgaagatcgcagacttcgggctggcccgggacgtgcacaacctcgactactacaagaagacaaccaacggccggctccccgtgaagtggatggcgcctgaggccttgtttgaccgagtctacactcaccagagtgacgtctggtcctttggggtcctgctctgggagatcttcacgctggggggctccccgtaccccggcatccctgtggaggagctcttcaagctgctgaaggagggccaccgcatggacaagcccgccaactgcacacacgacctgtacatgatcatgcgggagtgctggcatgccgcgccctcccagaggcccaccttcaagcagctggtggaggacctggaccgtgtccttaccgtgacgtccaccgacgagtacctggacctgtcggcgcctttcgagcagtactccccgggtggccaggacacccccagctccagctcctcaggggacgactccgtgtttgcccacgacctgctgcccccggccccacccagcagtgggggctcgcggacgtgaagggccactggtccccaacaatgtgaggggtccctagcagcccaccctgctgctggtgcacagccactccccggcatgagactcagtgcagatggagagacagctacacagagctttggtctgtgtgtgtgtgtgtgcgtgtgtgtgtgtgtgtgcacatccgcgtgtgcctgtgtgcgtgcgcatcttgcctccaggtgcagaggtaccctgggtgtccccgctgctgtgcaacggtctcctgactggtgctgcagcaccgaggggcctttgttctggggggacccagtgcagaatgtaagtgggcccacccggtgggaccccgtggggcagggagctgggcccgacatggctcggcctctgcctttgcaccacgggacatcacagggtgcgctcggcccctcccacacccaaagctgagcctgcagggaagccccacatgtccagcaccttgtgcctggggtgttagtggcaccgcctccccacctccaggctttcccacttcccaccctgcccctcagagactgaaattacgggtacctgaagatgggagcctttaccttttatgcaaaaggtttattccggaaactagtgtacatttctataaatagatgctgtgtatatggtatatatacatatatatatataacatatatggaagaggaaaaggctggtacaacggaggcctgcgaccctgggggcacaggaggcaggcatggccctgggcggggcgtgggggggcgtggagggaggccccaggggtctcacccatgcaagcagaggaccagggctttttctggcaccgcagttttgttttaaaactggacctgtatatttgtaaagctatttatgggcccctggcactcttgttcccacaccccaacacttccagcatttagctggccacatggcggagagttttaatttttaacttattgacaaccgagaaggtttatcccgccgatagagggacggccaagaatgtacgtccagcctgccccggagctggaggatcccctccaagcctaaaaggttgttaatagttggaggtgattccagtgaagatattttatttgctttgtcctttttcaggagaattagatttctataggatttttctttaggagatttattttttggacttcaaagcaagctggtattttcatacaaattcttctaattgctgtgtgtcccaggcagggagacggtttccagggaggggccggccctgtgtgcaggttccgatgttattagatgttacaagtttatatatatctatatatataatttattgagtttttacaagatgtatttgttgtagacttaacacttcttacgcaatgcttctagagttttatagcctggactgctacctttcaaagcttggagggaagccgtgaattcagttggttcgttctgtactgttactgggccctgagtctgggcagctgtcccttgcttgcctgcagggccatggctcagggtggtctcttcttggggcccagtgcatggtggccagaggtgtcacccaaaccggcaggtgcgattttgttaacccagcgacgaactttccgaaaaataaagacacctggttgctaacctgaaaaaaaaaaaaaaaaaaaaaaaaaaaaaa

SEQ ID NO: 6863 - DNA, 1740 bp, Homo sapiens
  misc_feature (1)..(1740): n=a,t,g or c
ctccacgttctgctcccactcgctctcctgtccccttcccctcccctcccggcgcaaagccccccgaaaccaacaaagctgagccgagagaaacaaacaaaacaaacacaccgggccagacaagccatcgacaaaactttgcaaaagcaaaaacaaaaaaggaaaaactaaccaacctcaaccaaccagcccccgagccacccggggcgccctcccgcgccctcttgcaccctcgcacacacaaaaggcggcgcgccggagcccgagacccggggagccgccgccgccccgccgccgcccgcagccaggggagcaggaagtccggacgcagcccccatagatatggcaatggtagtcagcacgtggcgcgacccccaggacgaggtgcccggctcacagggcagccaggcctcgcaggcgccgcccgtgcccggcccgccgcccggcgccccgcacacgccacagacgcccggccaagggggcccagccagcacgccagcccagacggcggccggtggccagggcggccctggcggcccgggtagcgacaagcagcagcagcagcaacacatcgagtgcgtggtgtgcggagacaagtcgagcggcaagcactacggccagttcacgtgcgagggctgcaagagcttcttcaagcgcagcgtgcggaggaacctgagctacacgtgccgcgccaaccggaactgtcccatcgaccagcaccatcgcaaccagtgccagtactgccgcctcaaaaagtgcctcaaagtgggcatgagacgggaagcggtgcagaggggcaggatgccgccgacccagccgacccacgggcagttcgcgctgaccaacggggatcccctcaactgccactcgtacctgtccggatatatttccctgctgttgcgcgcggagccctatcccacgtcgcgcttcggcagccaatgcatgcagcccaacaacatcatgggtatcgagaacatttgcgaactggccgcgaggatgctcttcagcgccgtcgagtgggcccggaacatccccttcttccccgacctgcagatcacggaccaggtggccctgcttcgcctcacctggagcgagctgtttgtgttgaatgcggcgcagtgctccatgcccctccacgtcgccccgctcctggccgccgccggcctgcatgcttcgcccatgtccgccgaccgggtggtcgcctttatggaccacatacggatcttccaagagcaagtggagaagctcaaggcgctgcacgttgactcagccgagtacagctgcctcaaggccatagtcctgttcacctcagatgcctgtggtctctctgatgtagcccatgtggaaagcttgcaggaaaagtctcagtgtgctttggaagaatacgttaggagccagtaccccaaccagccgacgagattcggaaagcttttgcttcgcctcccttccctccgcaccgtctcctcctcagtcatagagcaattgtttttcgtccgtttggtaggtaaaacccccatcgaaaccctcatccgggatatgttactgtccggcagcagttttaactggccgtatatggcaattcaataaataaataaaataagaagggggagtgaaacagagaaagaaaaggcaaaagactggtttgtttgcttaatttccttctgttaagaaaggatataaaaggatgttacaagtttgctaaaagaagagaggggaagaatttaatggactgtgaatttc

SEQ ID NO: 6864 - DNA, 3762 bp, Homo sapiens; identical to SEQ ID NO: 6592
  misc_feature (1)..(3762): n=a,t,g or c

SEQ ID NO: 6865 - DNA, 15571 bp, Homo sapiens; identical to SEQ ID NO: 6593
  misc_feature (1)..(15571): n=a,t,g or c

SEQ ID NO: 6866 - DNA, 2491 bp, Homo sapiens; identical to SEQ ID NO: 164
  misc_feature (1)..(2491): n=a,t,g or c

SEQ ID NO: 6867 - DNA, 1930 bp, Homo sapiens; identical to SEQ ID NO: 5990
  misc_feature (1)..(1930): n=a,t,g or c

SEQ ID NO: 6868 - DNA, 1519 bp, Homo sapiens
  misc_feature (1)..(1519): n=a,t,g or c
tgtgatttcttttaggatggaagagtgtagaaagtgtcccaaagttggtgtctgaatatatgtccaaaaagataaaagttgatgaatttgtgactcacaatctgtcttttgatgaaatcaacaaagcctttgaactgatgcattctggaaagaggtaggctttctctttatatatcatagaatgtaataatgatgttgagtttgaggggatggagagtcgaaaaacacaattttagttgtcttaaaggtatcatttaaaacttagtatgttgcttccttttacagcattcgaactgttgtaaagatttaattcaaaagagaaaataatgtccatcctgtcgtgatgtgataggagcagcttaacaggcagggagaagcgcctccaacctcacagcctcgtagagcttcacagctactccagaaaatagggttatgtgtgtcattcatgaatctctataatcaaggacaaggataattcagtcatgaacctgttttctggatgctcctccacataaataattgctagtttattaaggaatattttaacataataaaagtaatttctacatttgtgtggaaattgtcttgttttatgctgtcatcattgtcacggtttgtctgcccattatcttcattctgcaagggaaagggaaaggaagcagggcagtggtgggtgtctgaaacctcagaaacataacgttgaacttttaagggtctcagtccccgttgattaaagaacagatcctagccatcagtgacaaagttaatcaggacccaagtctgcttctgtgatattatctttaagggaggtactgtgccttgttcatacctgtaccccaaattcctaggatggcatctgccttcagggggcactaaaatgtattattgaaacagcattctgggcttaaataggtgtatgtatgtgttggttgtgactgtactatttctagtatagtgaactacatactgaatatccaagttctcagcacctacttttgtcaaatcttaacattttgccacttcgagatcacattgccattcctcccctccaagaggtaacaattatccacaatttgatgtttatcattcctgtgttgttgtactttcactgtgtataacctaaaccatctactctttagtactgttttatatatttttaagcctcatacttgctcattctacagcttttttcactcattattgtataattatatctgaagctctcgttcattaattttagtcctgtgtagcagaattcaattacgggaactaccataatttatctgttctccagtccagttgaaggcatgaagttgttgccagtttctgtattataacactgtagtggaacattcttctgcattgggctcactgcgtgttacctaagacgtatcacagaataaacacatttagccttatagacattgccaaattgctcttcaaagtaaatgtgagtttttgtgaattacatgagtatggaatggtgttttattatgactttagtttgcattttcctcaa

SEQ ID NO: 6869 - DNA, 1423 bp, Homo sapiens
  misc_feature (1)..(1423): n=a,t,g or c
ctccgctatcaacaacttattaaagaaaacttgaaagaaattgccaagttaatcacattggaacaagggaagaccctagctgatgctgaaggagatgtatttcgaggccttcaggtggttgagcatgcctgtagtgtgacatccctcatgatgggagagaccatgccatccatcaccaaagacatggacctttattcctaccgtctgcctctgggagtgtgtgcaggcattgctccattcaattttcctgccatgatccccctttggatgtttcccatggccatggtgtgtggaaataccttcctaatgaaaccatctgagcgagtccctggagcaactatgcttcttgctaagttgctccaggattctggtgcccctgatggaacattaaacatcatccatggacagcatgaagctgtaaattttatttgcgatcatccggacatcaaagcaatcagctttgtgggatccaacaaggcaggagagtatatcttcgagagaggatcaagacatggcaagagggttcaagccaatatgggagccaagaaccatggggtagtcatgccagatgccaataaggaaaataccctgaaccagctggttggggcagcatttggagctgctggtcagcgctgcatggctctttcaacagcagtccttgtgggagaagccaagaagtggctgccagagctggtggagcatgccaaaaacctgagagtcaatgcaggagatcagcctggagctgatcttggccctctgatcactccccaggccaaagagcgagtctgtaatctgattgatagtggaacaaaggagggagcttccatccttcttgatggacgaaaaattaaagtgaaaggctatgaaaatggcaactttgttggaccaaccatcatctcgaatgtcaagccaaatatgacctgttacaaagaggagatttttggtccagttcttgtggttctggagacagaaacattggatgaagccatccagattgtaaataacaacccatatggaaatggaactgccatcttcaccaccaatggagccactgctcggaaatatgcccacttggtggatgttggacaggtgggagtgaatgtccccattccagtgcctttgccaatgttctcattcaccggctctcgatcctccttcaggggagacaccaatttctatggcaaacagggcatccaattctacactcagttaaagaccattacttctcagtggaaagaagaagatgctactctttcctcacctgctgttgtcatgcctaccatgggccgttagaaacaagtttgtttaagactgactccatcctgagtaatctccctttatttttgaccagcttcatttgtcagctttgctcagatcagatcgatgggattggaatacattgtaactaaaatcttaaaaaaaa

SEQ ID NO: 6870 - DNA, 1435 bp, Homo sapiens; identical to SEQ ID NO: 2030
  misc_feature (1)..(1435): n=a,t,g or c

SEQ ID NO: 6871 - DNA, 1791 bp, Homo sapiens
  misc_feature (1)..(1791): n=a,t,g or c
gccggtaggggacgcgccggcacagcaaaaatggcggcggcattacgggtggcggcggtcggggcaaggctcagcgttctggcgagcggtctccgcgccgcggtccgcagcctttgcagccaggccacctctgttaacgaacgcatcgaaaacaagcgccggaccgcgctgctgggagggggccaacgccgtattgacgcgcacgacaagcgaggaaagctaacagccagggagaggatcagtctcttgctggaccctggcagctttgttgagagcgacatgtttgtggaacacagatgtgcagattttggaatggctgctgataagaataagtttcctggagacagcgtggtcactggacgaggccgaatcaatggaagattggtttatgtcttcagtcaggattttacagtttttggaggcagtctgtcaggagcacatgcccaaaagatctgcaaaatcatggaccaggccataacggtgggggctccagtgattgggctgaatgactctgggggagcacggatccaagaaggagtggagtctttggctggctatgcagacatctttctgaggaatgttacggcatccggagtcatccctcagatttctctgatcatgggcccatgtgctggtggggccgtctactccccagccctaacagacttcacgttcatggtaaaggacacctcctacctgttcatcactggccctgatgttgtgaagtctgtcaccaatgaggatgttacccaggaggagctcggtggtgccaagacccacaccaccatgtcaggtgtggcccacagagcttttgaaaatgatgttgatgccttgtgtaatctccgggatttcttcaactacctgcccctgagcagtcaggacccggctcccgtccgtgagtgccacgatcccagtgaccgtctggttcctgagcttgacacaattgtccctttggaatcaaccaaagcctacaacatggtggacatcatacactctgttgttgatgagcgtgaattttttgagatcatgcccaattatgccaagaacatcattgttggttttgcaagaatgaatgggaggactgttggaattgttggcaaccaacctaaggtggcctcaggatgcttggatattaattcatctgtgaaaggggctcgttttgtcagattctgtgatgcattcaatattccactcatcacttttgttgatgtccctggctttctacctggcacagcacaggaatacgggggcatcatccggcatggtgccaagcttctctacgcatttgctgaggcaactgtacccaaagtcacagtcatcaccaggaaggcctatggaggtgcctatgatgtcatgagctctaagcacctttgtggtgataccaactatgcctggcccaccgcagagattgcagtcatgggagcaaagggcgctgtggagatcatcttcaaagggcatgagaatgtggaagctgctcaggcagagtacatcgagaagtttgccaaccctttccctgcagcagtgcgagggtttgtggatgacatcatccaaccttcttccacacgtgcccgaatctgctgtgacctggatgtcttggccagcaagaaggtacaacgtccttggagaaaacatgcaaatattccattgtaaacaaatcaaaggaaaagaaaccaagaactgaattactgtctgcccattcacatcccattcctgccttttgcaatcatcaaacctgggaatccaaatagttggataacttagaataactaagtttattaaattctagaaaga

SEQ ID NO: 6872 - DNA, 1809 bp, Homo sapiens
  misc_feature (1)..(1809): n=a,t,g or c
cctgctccaaggtccagagagctttctggtctttgcagcaggcctgccgccttcatgtccactctcctcatcaatcagccccagtatgcgtggctgaaagagctggggctccgcgaggaaaacgagggcgtgtataatggaagctggggaggccggggagaggttattacgacctattgccccgctaacaacgagccaatagcaagagtccgacaggccagtgtggcagactatgaagaaactgtaaagaaagcaagagaagcatggaaaatctgggcagatattcctgctccaaaacgaggagaaatagtaagacagattggcgatgccttgcgggagaagatccaagtactaggaagcttggtgtctttggagatggggaaaatcttagtggaaggtgtgggtgaagttcaggagtatgtggatatctgtgactatgctgttggtttatcaaggatgattggaggacctatcttgccttctgaaagatctggccatgcactgattgagcagtggaatcccgtaggcctggttggaatcatcacggcattcaatttccctgtggcagtgtatggttggaacaacgccatcgccatgatctgtggaaatgtctgcctctggaaaggagctccaaccacttccctcattagtgtggctgtcacaaagataatagccaaggttctggaggacaacaagctgcctggtgcaatttgttccttgacttgtggtggagcagatattggcacagcaatggccaaagatgaacgagtgaacctgctgtccttcactgggagcactcaggtgggaaaacaggtgggcctgatggtgcaggagaggtttgggagaagtctgttggaacttggaggaaacaatgccattattgcctttgaagatgcagacctcagcttagttgttccatcagctctcttcgctgctgtgggaacagctggccagaggtgtaccactgcgaggcgactgtttatacatgaaagcatccatgatgaggttgtaaacagacttaaaaaggcctatgcacagatccgagttgggaacccatgggaccctaatgttctctatgggccactccacaccaagcaggcagtgagcatgtttcttggagcagtggaagaagcaaagaaagaaggtggcacagtggtctatgggggcaaggttatggatcgccctggaaattatgtagaaccgacaattgtgacaggtcttggccacgatgcgtccattgcacacacagagactttcgctccgattctctatgtctttaaattcaagaatgaagaagaggtctttgcatggaataatgaagtaaaacagggactttcaagtagcatctttaccaaagatctgggcagaatctttcgctggcttggacctaaaggatcagactgtggcattgtaaatgtcaacattccaacaagtggggctgagattggaggtgcctttggaggagaaaagcacactggtggtggcagggagtctggcagtgatgcctggaaacagtacatgagaaggtctacttgtactatcaactacagtaaagaccttcctctggcccaaggaatcaagtttcagtaaaggtgttttagatgaacatcccttaatttgaggtgttccagcagctgtttttggagaagacaaagaagattaaagttttccctgaataaatgcattattatgactgtgacagtgactaatccccctatgaccccaaagccctgattaaatcaagagattccttttttaaaaatcaaaataaaattgttacaacatagccatagttactaaaaaaaaaaa

SEQ ID NO: 6873 - DNA, 2517 bp, Homo sapiens
  misc_feature (1)..(2517): n=a,t,g or c
ttcctccaggagtctctggtgcagctggggtggaatctggccaggccctgcttaggcccccatcctggggtcaggaaatttggaggataaggcccttcagccccaaggtcagcagggacgagcgggcagactggcgggtgtacaggagggctgggttgacctgtccttggtcactgaggccattggatcttcctccagtggctgccaggatttctggtggaagagacaggaaggcctcccccccttggtcgggtcagcctgggggctgagggcctggctgtcagccactcttcccagaacatatgtcatggcctcagtggctcatggggaagcaggggtgggcgagcttaggctagagcaagtcctgtgggagatggcagaggcctggtctgagaggcaactcggatgtgccctccagtggccatgctcccctccatgcgtctcccctgccctcctggagccctgcaggtcaatgtttaacagaaaccagagcagcggtggattaatgcgcaagggctcagccccccagccctgagcagtgggggaatcggagactttgcaacctgttctcagctctgcctcccctggccaggttgtcctcgaccagtcccgtgccatggcagcccacctgcttcccatctgcgccctcttcctgaccttactcgatatggcccaaggctttaggggccccttgctacccaaccggcccttcaccaccgtctggaatgcaaacacccagtggtgcctggagaggcacggtgtggacgtggatgtcagtgtcttcgatgtggtagccaacccagggcagaccttccgcggccctgacatgacaattttctatagctcccagctgggcacctacccctactacacgcccactggggagcctgtgtttggtggtctgccccagaatgccagcctgattgcccacctggcccgcacattccaggacatcctggctgccatacctgctcctgacttctcagggctggcagtcatcgactgggaggcatggcgcccacgctgggccttcaactgggacaccaaggacatttaccggcagcgctcacgggcactggtacaggcacagcaccctgattggccagctcctcaggtggaggcagtagcccaggaccagttccagggagctgcacgggcctggatggcaggcaccctccagctggggcgggcactgcgtcctcgcggcctctggggcttctatggcttccctgactgctacaactatgactttctaagccccaactacaccggccagtgcccatcaggcatccgtgcccaaaatgaccagctagggtggctgtggggccagagccgtgccctctatcccagcatctacatgcccgcagtgctggagggcacagggaagtcacagatgtatgtgcaacaccgtgtggccgaggcattccgtgtggctgtggctgctggtgaccccaatctgccggtgctgccctatgtccagatcttctatgacacgacaaaccactttctgcccctggatgagctggagcacagcctgggggagagtgcggcccagggggcagctggagtggtgctctgggtgagctgggaaaatacaagaaccaaggaatcatgtcaggccatcaaggagtatatggacactacactggggcccttcatcctgaacgtgaccagtggggcccttctctgcagtcaagccctgtgctccggccatggccgctgtgtccgccgcaccagccaccccaaagccctcctcctccttaaccctgccagtttctccatccagctcacgcctggtggtgggcccctgagcctgcggggtgccctctcacttgaagatcaggcacagatggctgtggagttcaaatgtcgatgctaccctggctggcaggcaccgtggtgtgagcggaagagcatgtggtgattggccacacactgagttgcacatattgagaacctaatgcactctgggtctggccagggcttcctcaaatacatgcacagtcatacaagtcatggtcacagtaaagagtacactcagccactgtcacaggcatattccctgcacacacatgcatacttacagactggaatagtggcataaggagttagaaccacagcagacaccattcattccatgtccatatgcatctacttggcaaggtcatagacaattcctccagagacactgagccagtctttgaactgcagcaatcacaaaggctgacattcactgagtgcctactctttgccaatccccgtgctaagcgttttatgtggacttattcattcctcacaatgaggctatgaggaaactgagtcactcacattgagagtaagcacgttgcccaaggttgcacagcaagaaaagggagaagttgagattcaaacccaggctgtctagctccgggggtacagcccttgcactcctactgagtttgtggtaaccagccctgcacgacccctgaatctgctgagaggcaccagtccagcaaataaagcagtcatgatttactt

SEQ ID NO: 6874 - DNA, 3945 bp, Homo sapiens
  misc_feature (1)..(3945): n=a,t,g or c
cgtccacccgcccagggagagtcagacctgggggggcgagggccccccaaactcagttcggatcctacccgagtgaggcggcgccatggagctccgggtgctgctctgctgggcttcgttggccgcagctttggaagagaccctgctgaacacaaaattggaaactgctgatctgaagtgggtgacattccctcaggtggacgggcagtgggaggaactgagcggcctggatgaggaacagcacagcgtgcgcacctacgaagtgtgtgaagtgcagcgtgccccgggccaggcccactggcttcgcacaggttgggtcccacggcggggcgccgtccacgtgtacgccacgctgcgcttcaccatgctcgagtgcctgtccctgcctcgggctgggcgctcctgcaaggagaccttcaccgtcttctactatgagagcgatgcggacacggccacggccctcacgccagcctggatggagaacccctacatcaaggtggacacggtggccgcggagcatctcacccggaagcgccctggggccgaggccaccgggaaggtgaatgtcaagacgctgcgtctgggaccgctcagcaaggctggcttctacctggccttccaggaccagggtgcctgcatggccctgctatccctgcacctcttctacaaaaagtgcgcccagctgactgtgaacctgactcgattcccggagactgtgcctcgggagctggttgtgcccgtggccggtagctgcgtggtggatgccgtccccgcccctggccccagccccagcctctactgccgtgaggatggccagtgggccgaacagccggtcacgggctgcagctgtgctccggggttcgaggcagctgaggggaacaccaagtgccgagcctgtgcccagggcaccttcaagcccctgtcaggagaagggtcctgccagccatgcccagccaatagccactctaacaccattggatctgccgtctgccagtgccgcgtcggggacttccgggcacgcacagacccccggggtgcaccctgcaccacccctccttcggctccgcggagcgtggtttcccgcctgaacggctcctccctgcacctggaatggagtgcccccctggagtctggtggccgagaggacctcacctacgccctccgctgccgggagtgccgacccggaggctcctgtgcgccctgcgggggagacctgacttttgaccccggcccccgggacctggtggagccctgggtggtggttcgagggctacgtccggacttcacctatacctttgaggtcactgcattgaacggggtatcctccttagccacggggcccgtcccatttgagcctgtcaatgtcaccactgaccgagaggtacctcctgcagtgtctgacatccgggtgacgcggtcctcacccagcagcttgagcctggcctgggctgttccccgggcacccagtggggcgtggctggactacgaggtcaaataccatgagaagggcgccgagggtcccagcagcgtgcggttcctgaagacgtcagaaaaccgggcagagctgcgggggctgaagcggggagccagctacctggtgcaggtacgggcgcgctctgaggccggctacgggcccttcggccaggaacatcacagccagacccaactggatgagagcgagggctggcgggagcagctggccctgattgcgggcacggcagtcgtgggtgtggtcctggtcctggtggtcattgtggtcgcagttctctgcctcaggaagcagagcaatgggagagaagcagaatattcggacaaacacggacagtatctcatcggacatggtactaaggtctacatcgaccccttcacttatgaagaccctaatgaggctgtgagggaatttgcaaaagagatcgatgtctcctacgtcaagattgaagaggtgattggtgcaggtgagtttggcgaggtgtgccgggggcggctcaaggccccagggaagaaggagagctgtgtggcaatcaagaccctgaagggtggctacacggagcggcagcggcgtgagtttctgagcgaggcctccatcatgggccagttcgagcaccccaatatcatccgcctggagggcgtggtcaccaacagcatgcccgtcatgattctcacagagttcatggagaacggcgccctggactccttcctgcggctaaacgacggacagttcacagtcatccagctcgtgggcatgctgcggggcatcgcctcgggcatgcggtaccttgccgagatgagctacgtccaccgagacctggctgctcgcaacatcctagtcaacagcaacctcgtctgcaaagtgtctgactttggcctttcccgattcctggaggagaactcttccgatcccacctacacgagctccctgggaggaaagattcccatccgatggactgccccggaggccattgccttccggaagttcacttccgccagtgatgcctggagttacgggattgtgatgtgggaggtgatgtcatttggggagaggccgtactgggacatgagcaatcaggacgtgatcaatgccattgaacaggactaccggctgcccccgcccccagactgtcccacctccctccaccagctcatgctggactgttggcagaaagaccggaatgcccggccccgcttcccccaggtggtcagcgccctggacaagatgatccggaaccccgccagcctcaaaatcgtggcccgggagaatggcggggcctcacaccctctcctggaccagcggcagcctcactactcagcttttggctctgtgggcgagtggcttcgggccatcaaaatgggaagatacgaagcccgtttcgcagccgctggctttggctccttcgagctggtcagccagatctctgctgaggacctgctccgaatcggagtcactctggcgggacaccagaagaaaatcttggccagtgtccagcacatgaagtcccaggccaagccgggaaccccgggtgggacaggaggaccggccccgcagtactgacctgcaggaactccccaccccagggacaccgcctccccattttccggggcagcgtggggactcacagaggcccccagccctgtgccccgctggattgcactttgagcccgtggggtgaggagttggcaatttggagagacaggatttgggggttctgccataataggaggggaaaatcaccccccagccacctcggggaactccagaccaagggtgagggcgcctttccctcaggactgggtgtgaccagaggaaaaggaagtgcccaacatctcccagcctccccaggtgcccccctcaccttgatgggtgcgttcccgcagaccaaagagagtgtgactcccttgccagctccagagtgggggggctgtcccagggggcaagaaggggtgtcagggcccagtgacaaaatcattggggtttgtagtcccaacttgctgctgtcaccaccaaactcaatcatttttttcccttgtaaatgcccctcccccagctgctgccttcatattgaaggtttttgagttttgtttttggtcttaatttttctccccgttccctttttgtttcttcgttttgtttttctaccgtccttgtcataactttgtgttggagggaacctgtttcactatggcctcctttgcccaagttgaaacaggggcccatcatcatgtctgtttccagaacagtgccttggtcatcccacatccccggaccccgcctgggacccccaagatgtgtcctatgaaggggtgtggggtgaggtagtgaaaagggcggtagttggtggtggaacccagaaacggacgccggtgcttggaggggttcttaaattatatttaaaaaagtaactttttgtataaataaaagaaaatgggacgtgtcccagctccaggggt

SEQ ID NO: 6875 - DNA, 14770 bp, Homo sapiens; identical to SEQ ID NO: 230
  misc_feature (1)..(14770): n=a,t,g or c

SEQ ID NO: 6876 - DNA, 2381 bp, Homo sapiens
  misc_feature (1)..(2381): n=a,t,g or c
gaattcggcacgaggcgggctcaacttcgcagacctcatggctaggcaggggctgtacgaccgtctcccgcctctgcctgtcactccgggcatggagggcgcgggtgttgtgatcgcagtgggcgagggagtcagcgaccgcaaggcaggagaccgggtgatggtgttgaaccggtcagggatgtggcaggaagaggtgactgtgccctcggtccagaccttcctgattcctgaggccatgacctttgaggaagctgctgccttgctcgtcaattacattacagcctacatggtcctctttgacttcggcaacctacagcctggccacagcgtcttggtacacatggctgcagggggtgtgggtatggctgccgtgcacgtgtgccgtacagtggagaatgtgacagtgttcggaacggcctcggccagcaagcacgaggcactgaaggagaatggggtcacacatcccatcgactatcacacgactgactacgtggatgagatcaagaagatttcccctaaaggagtggacattgtcatggaccctctgggtgggtcagatactgccaagggctacaacctcctgaaacccatgggcaaagtcgtcacctatggaatggccaacctgctgacgggccccaaacggaacctgatggccctggcccggacatggtggaatcagttcagcgtgacagctctgcagctgctgcaggccaaccgggctgtgtgtggcttccacctgggctacctggatggtgaggtggagctggtcagtggtgtggtggcccgcctcctggctctgtacaaccagggccacatcaagccccacattgactcagtctggcccttcgagaaggtggctgatgccatgaaacagatgcaggagaagaagaatgtgggcaaggtcctcctggttccagggccagagaaggagagctagggcaagtggctgtgagaccctagagaccagcgaagggagaagttgggaagctacgttctgttggccaccagacttgcatttcagcctctgtcataatgctctgccctccctcccccgaaggtctctgtggtgatgaccgctcttccctgcccctccccgcttcctgacctctgaagaggttgggaagtgaccatttggatgtctgggccctgccaaggcgacagggagggtcagagggaggccggctgcttcctgcccccaccctttccccgggcctgctgtgctgcttttgtgccaaggttagccagtcccccctgttgtgttccatgtgctttcacctctgcctcatctttcctcccgtccctgccccgccacctccccaaagaattgaagacgtcagctcaggatatggggccatctctgtgagtcagcatgtacctgtctctcctagtgtccttcagcctgggctgaccagtgccgcctctgggcttgaccagttccaatctgtctgtccaacttcttaagcacaattgggcttcttcatctccaggttttctgccattcttaaccaaggctgcctcttccaacagggcgggaatcagacctactcccctaggtcacaactctgggaaggatacagagcccccacccttcactgagttctctggatttgttctcagtgccttagcaacgaaaacctgtgcttgtgtgtgtgtggcggcggggagggaggatcctgtttcccacctccttctcctcccctgtactccccagtgccttccttgttctggtggagctggggtttctctcctccccagtccacaacactgccaaaatctgtgtatgtggccattgggtggggcagccccaagcctcctggggaggcagggcaaaaacaggtgccctcatcgtggtctgtgccatgtcccgtctctatggtggttgaggagaaaggcggggaagcttcctcagccttgcagatatgtgtggcatttactagccagagctccgaaaggcagtgctgtctgtttcttgtactgggaccaaagtaaaaatccaagcacatccccttgcacttaggggaggccctactgcctctctcaaagcagagaggcagcttatcaaacctcagcccaaaactctgtttacatgggtggggagatggagcagggaactacagagtgggatggtcaggacctgggccattgcaaccaaaatggggacttcctgggtagggaggtcactccctctactcactagctaggattagggagggttattgccccaccattgcaatgggaggtggagggacaggctcagcctcctcattgtctaaatgaggcctaaatgtgtgaagtgcgatttctgcttttgtgtaccccaccaccccattaccacagctgcctttgtgtgtttgggtcaataaaaagccaaaccctga

SEQ ID NO: 6877 - DNA, 7720 bp, Homo sapiens; identical to SEQ ID NO: 3973
  misc_feature (1)..(7720): n=a,t,g or c

SEQ ID NO: 6878 - DNA, 1717 bp, Homo sapiens
  misc_feature (1)..(1717): n=a,t,g or c
gtggattcttgtccatagtgcatctgctttaagaattaacgaaagcagtgtcaagacagtaaggattcaaaccatttgccaaaaatgagtctaagtgcatttactctcttcctggcattgattggtggtaccagtggccagtactatgattatgattttcccctatcaatttatgggcaatcatcaccaaactgtgcaccagaatgtaactgccctgaaagctacccaagtgccatgtactgtgatgagctgaaattgaaaagtgtaccaatggtgcctcctggaatcaagtatctttaccttaggaataaccagattgaccatattgatgaaaaggcctttgagaatgtaactgatctgcagtggctcattctagatcacaaccttctagaaaactccaagataaaagggagagttttctctaaattgaaacaactgaagaagctgcatataaaccacaacaacctgacagagtctgtgggcccacttcccaaatctctggaggatctgcagcttactcataacaagatcacaaagctgggctcttttgaaggattggtaaacctgaccttcatccatctccagcacaatcggctgaaagaggatgctgtttcagctgcttttaaaggtcttaaatcactcgaataccttgacttgagcttcaatcagatagccagactgccttctggtctccctgtctctcttctaactctctacttagacaacaataagatcagcaacatccctgatgagtatttcaagcgttttaatgcattgcagtatctgcgtttatctcacaacgaactggctgatagtggaatacctggaaattctttcaatgtgtcatccctggttgagctggatctgtcctataacaagcttaaaaacataccaactgtcaatgaaaaccttgaaaactattacctggaggtcaatcaacttgagaagtttgacataaagagcttctgcaagatcctggggccattatcctactccaagatcaagcatttgcgtttggatggcaatcgcatctcagaaaccagtcttccaccggatatgtatgaatgtctacgtgttgctaacgaagtcactcttaattaatatctgtatcctggaacaatattttatggttatgtttttctgtgtgtcagttttcatagtatccatattttattactgtttattacttccatgaattttaaaatctgagggaaatgttttgtaaacatttattttttttaaagaaaagatgaaaggcaggcctatttcatcacaagaacacacacatatacacgaatagacatcaaactcaatgctttatttgtaaatttagtgtttttttatttctactgtcaaatgatgtgcaaaaccttttactggttgcatggaaatcagccaagttttataatccttaaatcttaatgttcctcaaagcttggattaaatacatatggatgttactctcttgcaccaaattatcttgatacattcaaatttgtctggtaaaaaaataggtggtagatattgaggccaagaatattgcaaaatacatgaagcttcatgcacttaaagaagtatttttagaataagaatttgcatacttacctagtgaaacttttctagaattatttttcactctaagtcatgtatgtttctctttgattatttgcatgttatgtttaataagctactagcaaaataaaacatagcaaatggc

SEQ ID NO: 6879 - DNA, 3134 bp, Homo sapiens
  misc_feature (1)..(3134): n=a,t,g or c
tccagcgaacagccccgcttctaacccgagatgctgctgccggcgcccgcgctccgccgcgccctgctgtcccgcccctggaccggggccggcctgcggtggaagcacacctcctccctgaaggtggccaacgagcccgtcttagccttcacgcagggcagccctgagcgagatgccctgcaaaaggccttgaaggacctgaagggccggatggaagccatcccatgcgtgatgggggatgaggaggtgtggacgtcggacgtgcagtaccaagtgtcgccttttaaccatggacataaggtggccaagttctgttatgcagacaagagcctgctcaacaaagccattgaggctgccctggctgcccggaaagagtgggacctgaagcctattgcagaccgggcccagatcttcctgaaggcggcagacatgctgagtgggccgcgcagggctgagatcctcgccaagaccatggtgggacagggtaagaccgtgatccaagcggagattgacgctgcagcggaactcatcgacttcttccggttcaatgccaagtatgcggtggagctggaggggcagcagcccatcagcgtgcccccgagcaccaacagcacggtgtaccggggtctggagggcttcgtggcggccatctcgccctttaacttcactgcaatcggcggcaacctggcgggggcaccggccctgatgggcaacgtggtcctatggaagcccagtgacactgccatgctggccagctatgctgtctaccgcatccttcgggaggctggcctgccccccaacatcatccagtttgtgccagctgatgggcccctatttggggacactgtcaccagctcagagcacctctgtggcatcaacttcacaggcagtgtgcccaccttcaaacacctgtggaagcaggtggcccagaacctggaccggttccacaccttcccacgcctggctggagagtgcggcggaaagaacttccacttcgtgcaccgctcggccgacgtggagagcgtggtgagcgggaccctccgctcagccttcgagtacggtggccagaagtgttccgcctgctcgcgtctctacgtgccgcactcgctgtggccgcagatcaaagggcggctgctggaggagcacagtcggatcaaagtgggcgaccctgcagaggattttgggaccttcttctctgcagtgattgatgccaagtcctttgcccgtatcaagaagtggctggagcacgcgcgctcctcgcccagcctcaccatcctggctgggggcaagtgtgatgactccgtgggctactttgtggagccctgcatcgtggagagcaaggaccctcaggagcccatcatgaaggaggagatcttcgggcctgtactgtctgtgtacgtctacccggacgacaagtacaaggagacgctgcagctggttgacagcaccaccagctatggcctcacgggggcagtgttctcccaggataaggacgtcgtgcaggaggccacaaaggtgctgaggaatgctgccggcaacttctacatcaacgacaagtccactggctcgatagtgggccagcagccctttgggggggcccgagcctctggaaccaatgacaagccagggggcccacactacatcctgcgctggacgtcgccgcaggtcatcaaggagacacataagcccctgggggactggagctacgcgtacatgcagtgagcccctctcgggctccaccgtccagctgtctgtccgtccaggtggccgacctcactgcacagaccccactccagcccctccaccccttcttcatgcacagctgcctttctataatccgggcttgactcccttcttaccactgtattctggcctctcccatgcctcaggctctggtttgagatcgtgctggggaggaacatggccactaccccttatcccatcggccatgtgggaggtatgaccctggtgcctggcaggttctccctctgccctccactgggcccagtggctcagggacctggggaaaggagatggagcagctcttgggatcctttggggaaaaggaggccattctgggccccttggcaaacctcaccactcacagaggctcctggccttgatccctgcccctccaggtgtccagggtaaagtgtaactcagactgacctgtggggcacagggggcaccagctggccttgccctctctggtctgggctgtctaccttcctcactgtatctttgcccagacccacctgggccagtaggcctgtccccagccacacaccttagatgctggcatgccttactccaggtgcctgtgtttggccgaggcctgtgtgattcccggtctgcaccacatggcggggttggggggccgctggaggccacctgccaaggcgtgggatgggatggtcctgccggtttaggccgtgattctggaaaaccttggatgggccttcgtcctatgtcagccttccctttgatcctcaggccctacctgtagagacctccactcctagagccagtctcagggtctgggatttccctgcaggagctcagccaccactgtgccatggtgacacaggccaaggcagacattggccctcccttctcccagcccccagaggcctggccttgggttcgtcagcatgggccgaggacgttgcctgtagaatcctcctctgcctgggagtggctctgtgtggaccagtccctcactggcccattctttttttgacgcagccaatctgtgaccacgattcctcccacagatgcctcctgcttggattctgagtggtcagagatctgtaaagcatgactttcaaggatggttcttaggggactgtgtaaagtgttgggtcttcctccaggatgcctgcatgggaccccacccggagctggtgtggccattccccgaagtgccactggcccatggatgggggtgggtgctggtgcacctgggctgggtgtgggttctgtgtccttccaggatctgtgtcatttcccatgaggggccggggcaggtggctgggtgggggcacaggctggagtattcttagttctactggttctacactgtgaggtggcaatgggatttgctcagatgccacccaataaaatgcctgttactt

SEQ ID NO: 6880 - DNA, 2053 bp, Homo sapiens
  misc_feature (1)..(2053): n=a,t,g or c
ctttatctgaaacttgattgtcttaaatgtatttgtggagaaatataattattgtatattttgtgtaacagaatcagtgagaataagctggtcgcaaactgtcttgcctagagagagggcagtggcatacagctgcagaagcgcgacacgggcctgctgagtgttccgtttcatttcaaattaggtcattctgtcttgattttgatatggatgtttcagaagaccctagcagatgtccctgtttaacttgaaaccatagatcagaaaactaagttcatatttcaattttacagagatttgaatagaaaaagtaatcaagttaaaacctgcaaagctaaaattgaactacttgggagctatgatccacaaaaacaacttattattgaagatccctattatgtaagtacagttcacgttttagggctaatatgaagacccaacacatttgtatcctgccatattaaataacagatgagattgtgttaaggatgtttttgttatgcaggttttgccattttcttctttttcctgtccatttaggggaatgactctgactttgagacggtgtaccagcagtgtgtcaggtgctgcagagcgttcttggagaaggcccactgaggcaggttcgtgccctgctgcggccagcctgactagaccccaccctgaggtcctgcatttctcagtcggtgtgtaatcacgttccagggcccaaagccagctctttgttcagttgacttactgtttcttaccttaaaaagtaattgtagatggaaatcagttgtgtttggcaggagaatcaataaaaatgtttgattcagacagcttatggggtattttaagcattcttagactagttgaacatctcactttgccccagttacaaaaatagtagaacaagcaacataaaacaatgaaggaaaacctcacttgaaggcccaggtcaacatctaagcctgttgagacttagataatcgagtctacctcttcagtaggtttgtgtggatggcctggaggcaggtgcttgctccccagtgctacctctctcttccctagggccttttgtggattgacagtagtcccctccgtagagctcacagtctagattagaagtgttttaatttctacacacccatagtgcacacttgtatattgaaaagatagggaagagagaaacatttatggaatcagtcgttggcaccttcaatacttcatgatttttgtcgagtttacttcatgaggaggtcagcccattggctcccatctgaaccactttgcctctgaaacttaattacatccagaaagaaggacacttgtatgctagtctatggtcagttgaggaatatgactgtttttatatgcacatgtaacccaaatgtccaatataaattggcttattttttaaaataattttaaaagttgggaaaagtgttattatttggcatgcttaaatattgaataagtattcttcatcagcatttaataaatgtataggcagatgtaaggtaatttctgtgtattttgagataatgtcaaaatcatgaatatttcaaaataaactggggagttataaaaatacaactagagatataaatctgtgtctgtcctgttgttgattgacaggtaggaagcatttgcaaaacattgtattgtcctttttacatgatctgtgatgttaggcgtgcgtgccatattttagtcttcaggggataaggaagtaagacatgatgaaaagtcagcacgactgctgccccatgtcatcatgtctagtttctgaaggaagtttgaggttctacagctggaactgtccttgcccagtaccatcctctggacatgttgcctctacgctgtgccctcctgtgcagtgatcgactgcctggccaggacatctgcactcctgacctcagtatcatgagggtcccaggcagtgcatgggaggagacacgtttgatcctttgactccctagtatctttgaggataagcttgtttgcccagatgaaaagtgagtagtttcccactgtacccatgtggaagtgcccagggctgtcttcatag

SEQ ID NO: 6881 - DNA, 2481 bp, Homo sapiens
  misc_feature (1)..(2481): n=a,t,g or c
gccgccgccgcagctgctcctggtccccgtccctttgccgccctcgtcaggcccagctctcctgcgccgccgcctcccgccgcgccccgccatgccgctctactccgttactgtaaaatggggaaaggagaaatttgaaggtgtagaattgaatacagatgaacctccaatggtattcaaggctcagctgtttgcgttgactggagtccagcctgccagacagaaagttatggtgaaaggaggaacgctaaaggatgatgattggggaaacatcaaaataaaaaacggaatgactctactaatgatggggtcagcagatgctcttccagaagaaccctcagccaaaactgtcttcgtagaagacatgacagaagaacagttagcatctgctatggagttaccatgtggattgacaaaccttggtaacacttgttacatgaatgccacagttcagtgtattcgttctgtgcctgaactcaaagatgcccttaaaaggtatgcaggtgccttgagagcttcaggggaaatggcttcagcgcagtatattactgcagcccttagagatttgtttgattccatggataaaacttcttccagtattccacctattattctactgcagtttttgcacatggctttcccacagtttgccgagaaaggtgaacaaggacagtatcttcaacaggatgctaatgaatgttggatacaaatgatgcgagtattgcaacagaaattggaagcaatagaggatgattctgttaaagagacagactcctcatctgcatcggcagcgacaccttctaaaaagaaaagtttaatcgatcagttcttcggtgttgagtttgaaactaccatgaaatgtacagaatctgaagaagaagaagtcaccaaaggaaaggaaaatcaacttcagcttagctgttttatcaatcaggaagtcaagtatctttttacaggacttaaattgcgacttcaggaagaaatcaccaaacagtctccaacgttgcaaagaaatgccttgtatatcaaatcttccaagatcagccggctgcctgcttacttgaccattcagatggttcgatttttttataaagagaaggaatctgtgaatgccaaagttcttaaggatgttaaatttcctcttatgttggatatgtatgaactgtgtacaccagaacttcaagagaaaatggtgtcttttcgatccaaattcaaggatctagaagataaaaaagtgaatcagcagccaaatacaagtgacaaaaagagtagtccccagaaagaagttaagtatgaacccttttcttttgctgatgatattggctccaataattgtggatactatgacttacaagcagtactaacacaccagggaaggtctagttcttcaggtcattatgtatcatgggtgaaaaggaaacaagatgaatggattaagtttgatgatgacaaagtcagcatcgtaacaccagaagatatcttacggctttctggtggtggagactggcatatcgcttacgttctactctatgggcctcgcagagttgaaataatggaagaggaaagtgaacagtaatcttcattttagtatttatgcttagatgtgaaaataaatgttatttgttgatcatttctataatccagagctttagaggaagacacataggtgggtttatgtttcacctcatttggaacaaaagaggacagaagcagaccactctgtgcaccaacctaaaaaattacagagaagagaaaattatctttggattgtgctgccctatataaaggtggcagaaagacatttttaaaaagcttattatttcttgcattattttaaaaagttcagagttgaaatgcctttcaaccatttccttctgtggtcatttttcttgctgcctttttcacccaagattcagcagtcagatgtttactgcacacctattacctattatttgctgttcttgcatggttcaaaccaccattctgtagccacccatcctttgccttatctaacaaacatttttccaggaaggtggaaaaggaagtgttgctctcattgtgtgactcagtgctgctgtccatcccatggaaacatgggcacaatcaagtatttgtccagcctattgcaggcttttcctgactttaaaataaattgtgatcaataatagtacctttgattatacatttattattgtgtctctctctgatgtactgtggattgtacatttaactttggaatggctttgtaataatcagtcttaagaaaatgttgacaagctctggttgcttatttttagaaaatgaggacatttaataataataaaaaaaaagggattaatagcttttgacctcaagtcttttgtcttctgagtgttggagcttggctgaagacatgtttaatactgtacaatttctgaagatggttattaacactgtgctgttaagcatccatttaaaaatatgttatcttctttgcctgcc

SEQ ID NO: 6882 - DNA, 2253 bp, Homo sapiens
  misc_feature (1)..(2253): n=a,t,g or c
gtgcatgccgtgggtctgacggcttgagtagcgctagggagaatccctgcaggtaatatttgacttttgcttcatattaatctgagtggaaaataaaagggccctcttctcctctcgcttccctgccgggcaggcgccatggcggaagcctcggcgacgggcgcctgcggagaggcgatggcagcggcggaaggctcctcgggcccggcgggcttgactctgggccggagcttctcgaactaccggcccttcgagccccaggcgttgggcctcagcccgagctggcggctgacgggcttctccggcatgaagggctgaggctgcaaggtcccgcaggaggcgctgctcaaactcctggcgggactgacgcggccggacgtgcggcccccgctgggccggggcctggtgggtggccaggaagaggcgtcccaggaagccggcctgccggcaggagcgggccccagccccacctttccagccctgggcatcgggatggactcctgcgtcatccccctgaggcacgggggcctgtcactggtgcagaccacggacttcttttaccccttggtagaagatccctacatgatggggcgcatagcttgtgccaacgtgctgagtgacctctacgccatggggattactgagtgtgacaacatgttgatgttactcagcgtcagccagagtatgagtgaggaggaacgcgaaaaggtaacgccactcatggtcaaaggctttcgggatgcggctgaggaaggagggacggcagtgaccggtgggcaaacggtggtcaacccttggattataatcggtggagttgccactgtagtatgccaaccaaatgagttcataatgccggacagcgccgtcgttggggacgtgctggtgttaaccaaaccgttaggaacccaggttgctgtcaatgcccaccaatggctggataatcctgaaagatggaataaagtaaagatggtggtctccagagaagaggtggagctggcctatcaggaagccatgttcaatatggctaccctcaacagaactgctgcaggtttaatgcacacatttaatgcccatgcggccacagatatcacaggctttggcattctaggacactcccagaaccttgcaaaacaacaaagaaatgaagtgtcctttgttattcataatctgccaataattgccaagatggctgccgtcagcaaggccagtggacggtttgggcttcttcaaggaacctcagctgaaacctctgggggattactgatttgtctgccaagagaacaggcggctcgcttttgttctgaaatcaaatcctccaagtacggagagggtcaccaagcgtggatcgttggcattgtggaaaagggaaaccgaacggcccggatcattgacaagccgcgagttattgaagtcctgcctcgtggggccacagctgctgttcttgctcctgacagttcaaatgcctcctctgagcctagctcgtgagatgaaagaacagaagttgtttggaccttagagccattgtccacaatcacggatggttctcaagagttgattgtaagaaatttccaaagaaggctgcctgcatagtggttccggctgccctttctaggtgattggaatcagcccatctaaagcagtctttatatgcattccgaggccagagtaacattttgaactttggggggatatttgttcatcacttgggtagaagaggagcaaaaatacttctgttttctcttgccaaagtaagatgaagctattccaggttgagggatttttctttgcacggggttgattaatttctgcacagggagtgagattattaaagtaacacacacacaaagtaaattgcaaaatgaaaaaaattagaagcaaatgagttttggaccaatattgttgataaatctaaattgttaagagagatcttataatgcaacatcaaattctttattcaattttactgaagtactggctctttcctgctctggacaagaattgagcaacttgtctgatgactgggaaaggaggacctgcaaccatctgacttggtctctgttaatgacgtctctccctctaaaccccattaaggactgggagaggcagagcaagcctcagagcccaggcctcagtggtcattaagatgttaagtcttttgcggcagattcctggtgatttgatcaataaagagtaatttcttgctaaataaataaaagaaaccttgttgaaaaactaaaaaaaaaaaaaaaaaaa

SEQ ID NO: 6883 - DNA, 233 bp, Homo sapiens; identical to SEQ ID NO: 5863
  misc_feature (1)..(233): n=a,t,g or c

SEQ ID NO: 6884 - DNA, 3931 bp, Homo sapiens
  misc_feature (1)..(3931): n=a,t,g or c
gcccgggcgctctcagcaggatggccaacaccttccctctccatccatacaccccgccgccccctggcccgtggccgcgctcggttcccgcactgctcattccaccccctacatcccagcccgctgccagagccggggagagggcgggggccgcgtgggcgaggccgtgaacagcggctgtcacgtgggccgcccaggccaataggggtgaggctttgggtcgagctcagtcctcccccggcgcctccgactggcagtgggactcagcgggcgtggaggtcgcggctgagcgagcgagccctgggcgagtgaattgtggctgtgggttgacggtggagacaccccccggagggaggcggagggaagggaggcgaggcctcgacctgcatgcttcccgcctcccactccccagcgcccccggaccgtgcagttctctgcaggaccaggccatggagctcgaagtccggcgggtccgacaggcgttcctgtccggccggtcgcgacctctgcggtttcggctgcagcagctggaggccctgcggaggatggtgcaggagcgcgagaaggatatcctgacggccatcgccgccgacctgtgcaagagtgaattcaatgtgtacagtcaggaagtcattactgtccttggggaaattgattttatgcttgagaatcttcctgaatgggttactgctaaaccagttaagaagaacgtgctcaccatgctggatgaggcctatattcagccacagcctctgggagtggtgctgataatcggagcttggaattaccccttcgttctcaccattcagccactgataggagccatcgctgcaggaaatgctgtgattataaagccttctgaactgagtgaaaatacagccaagatcttggcaaagcttctccctcagtatttagaccaggatctctatattgttattaatggtggtgttgaggaaaccacggagctcctgaagcagcgatttgaccacattttctatacgggaaacactgcggttggcaaaattgtcatggaagctgctgccaagcatctgacccctgtgactcttgaactgggagggaaaagtccatgttatattgataaagattgtgacctggacattgtttgcagacgcataacctggggaaaatacatgaattgtggccaaacctgcattgcacccgactatattctctgtgaagcatccctccaaaatcaaattgtatggaagattaaggaaacagtgaaggaattttatggagaaaatataaaagagtctcctgattatgaaaggatcatcaatcttcgtcattttaagaggatactaagtttgcttgaaggacaaaagatagcttttggtggggagactgatgaggccacacgctacatagccccaacagtacttaccgatgttgatcctaaaaccaaggtgatgcaagaagaaatttttggaccaattcttccaatagtgcctgtgaaaaatgtagatgaggccataaatttcataaatgaacgtgaaaagcctctggctctttatgtattttcgcataaccataagctcatcaaacggatgattgatgagacatccagtggaggtgtcacaggcaatgacgtcattatgcacttcacgctcaactctttcccatttggaggagtgggttccagtgggatgggagcttatcacggaaaacatagttttgatactttttctcatcagcgtccctgtttattaaaaagtttaaagagagaaggtgctaacaaactcagatatcctcccaacagccagtcaaaggtggattggggaaaattttttctcttgaaacggttcaacaaagaaaaactcggtctcctgttgctcactttcctgggtattgtagccgctgtgcttgtcaaggcagaatattactgaagaatgatcctgttcaacctcctagtgcctctactgaattattcctcttttaaatggttaatgaaccaataatttttaaatcataccaaaaatagtaagaaaatatgcaaacactctgtgatcaaacttaaaagtcattgccattcatcattaataaaagttgccatttcaactacgtcccaacattccctaatagggtattcagggaacctgtcttaaattgtgcttatctaaatcttggaactttgagctaggggaggagaatgtattagactaaatacaaactgcggggttgtaagggagtctcagaacctcactgaatccttcactccagttaatggcactgctcacttcctgcctctgctgccaccatcactgtgtgaagctttcaagagcttggtacttcccagggctaccggcagtcctctgtagtccagagaggtgagattagatcttcttggttccctgtgaggtttcaggcactaaaactctatgtggggaagggaggggttactcctcctccaatgggactcaaggacttgacctccaggagtaggcccctggtcagaagtgccatctcaccagtggtcttcattcttcctcattcattctttatcatcctgtgttctgtttagttgcaacaatctcttgtgactaatgtcactcaaagcatcttgtaacctagggcttcctggaagttagttgccaaagtcatgcaagcatcacctgtcattcttgtgttggagttatagaattctacatcttataaaacctaactggcatttaaaaaatactgtggccgggcgtggtggctcatgcctgtaatcccagcactttgggaggccgaggtgggaggattgcttgagtccaggaatttgagaccagcctggacaacacagtgagacctcatctctatcaaaaaataaaaattagctagatgtggtggcatgagcctgtgttcccagctgcttaggaggctgaagcaggaggattgattgagcctgcgaggccaaggctgcagcaggctgtgattgcaccactgcacttcagcttgggcaacagagcaagaccctgtctccgaaacaaataaaaaatactgtaataaaagtacttataaacatactaatcctctttcaggaccctaaagttgcaggttagtaggtcttcaaggacaaatctgtaagtttcttttctgtagtgcaagtaaaatttcactttttgaaactatagagagatccctttctgattagcctacagaacttaaagtgagggaaccatttcctctcacagacaaagaggcctgggatattaggactttggggtttgagagcatcatggggcagacagatggtggatggtctggacaagaagcgagtaagccactgcggttggtcatactgaagggaattgatggcaagaggatcccctgagcaagtcagaagttactctcatcagtcgttcatggtcacaacctgaggtactctgctgagtgggcaaggctgaagtaagaggcctgtggaatgcagcattacctgctggacagagcagggcaggcagttctatgccttggagctcctgactgcagggactctgtccccacactcagaaagactcagctcactcaatgagagaatgtgatttactttatagaacgtataatcaactttgttgaataatttgttctattaaggctgtctaaaatgtgatgtcttcatcatagtatgaagtgttgaaaattaataacgagcctagtttaggaaaaagctgcttaaaactgtggctctaagagagtaatcataaaataccttagataaaattgcactatggaattttcattgagtatgtttaaattattggcttgtctactaatacatctgcttcaaaatgaacatatttcataaaattggcatcaattttaatgacgctcctggtatggaacctcagatataccctattggagacaatcctttgatcataaattctccccaactataaatcattttatgtctttaaaaaaaaaaaaa

SEQ ID NO: 6885 - DNA, 662 bp, Homo sapiens; identical to SEQ ID NO: 2432
  misc_feature (1)..(662): n=a,t,g or c

SEQ ID NO: 6886 - DNA, 2331 bp, Homo sapiens
  misc_feature (1)..(2331): n=a,t,g or c
cagtttcaagaggaaaagttaaataaattgcagaagttacttattcttttaagaggtctgcctggttytgggaaaacaacattgtctcggtaagtaaaggataccaactgaatacttggtaattcattatttaaaaattataaatgatatttgtcgccggctgcagtgactcatgcrtgtaatcccaacactttgggaggccagggtggaccagtcacttgagctcaggagtttgagaccagcctgggcaacatagtgagaccctgtctctaaaaaatgaaataaaaatgttagaactataatgatacttgtaatcactgacaagtgcttttatgtttctagtagaagaaaatctttaatttgctacacttgrgaatagcatctgacagtgtaactatttaaaaatcttttctgatagaagaaaggagaattggcatatgtttatatttagattctgctaagggctttaaaaatagataacaytacgtataattatggcagtgatgaaagcaaatgctacttgagaactgtcctggcctacccttttgagtcagctgttcaaggaaagttggactcagtgttagaaaatttgagtttttcaagttcagttggaggtgagaaaaagagaaaatttgggtattgactcagttatttccctttttcaccttgggcaagttttgctctctgttaatggaataaatgatacttactttttctggaattgggaatcaaatgagatgacccaaggaaaggaattttgaatgtgttgagcactgtgccatgttcataccattgattggcagaaggaacccttttttgatttcttaaaattcaggagtttgaagtgagtaatatctgaattggtgttagaactgttggyggtttattgtattacaagatatttcaaattcctttttttgtttacacttttaaactattgatgcacttgaatatgtttatgcagttgtgaaaaaatagygtaaagaaagcagtacaaattatcttgagtttatataagatgattcaagatttgtgccggacaaggagaaaaagaaaatttgttgatatctttgggtgaggatggagaggtccaagaaaccattttgcaaatgttttatattactaacaagacaatctaaacctaaataaacatctttttcagagaaaagacactagagaaagatttaatttgtgatamttcaagctagattatraactgtgatctttgtgaatgaattaattcattccagaattaaattttggtctttgtattttgattccttttactttagtgaggattttgtagagaagatgaaatttcacctctataataatagaagttaggagtgaggtctcacaaacatgggctgccttctagatttgggatataccatcagggacaataaataactgaaatttggaaactggataaargagtctgctagttaggaccacttgactaagagtgggtatagaagaaacctaaggaagaaaagttagatttgagacaacatattggagtatgttgaaattaaaggtgaataaagtagtggaaattcgatagaatttaaaggagacattgtagtgggagatggtagaggtgattagatataatatgtatatttatttgaaaaatagatatataagaatgaaagttgtatgtagtaccaacaagtaccattcgtattatgattcacaatttacagagtattttcatatataaaaatcttgtgcaatgggttgttttttcattttatagaaggagcagaggctaaaggaagttgaggttaagtgatttggaagtcacaaaaactagtaagagctcaaactagcaataaaattatagtatgtttttcccttgccttctctgtaatgcttaatggttgtgtagtcttatacgtgactcctgacttcaaggatcctggtctgtacctctttaggtcaacacgttttgagtgaactggtgttggttatttggaattagatataaagtcatatattctttggtgaggaatggcttcatataggagttcacaygcaaaacaagctttgccaaaataatagagtgaaaattggtagatcagagttgaggctgattggagggccaaactgaaagactggctgggcatgntggctcacacctgaaaacccagcactttgggagcccaaggcaggcagattgtttgagcccaggaattcaagaccagcctagataacctgggtatcccagctacttgggaggctgagctgccgaggctgcagtgacccatgatcgtgccatttctttctaacctgggtkacaggttnaaaccctttcccaaaaaaaaaaaa

SEQ ID NO: 6887 - DNA, 2436 bp, Homo sapiens
  misc_feature (1)..(2436): n=a,t,g or c
cgaccacctgtctggacaccacaaagatgccacccgttgggggcaaaaaggccaagaagggcatcctagaacgtttaaatgctggagagattgtgattggagatggagggtttgtctttgcactggagaagaggggctacgtaaaggcaggaccctggactcctgaagctgctgtggagcacccagaagcagttcgccagcttcatcgagagttcctcagagctggctcaaacgtcatgcagaccttcaccttctatgcgagtgaagacaagctggagaacaggggcaactatgtcttagagaagatatctgggcaggaagtcaatgaagctgcttgcgacatcgcccgacaagtggctgatgaaggagatgctttggtagcaggaggagtgagtcagacaccttcataccttagctgcaagagtgaaactgaagtcaaaaaagtatttctgcaacagttagaggtctttatgaagaagaacgtggacttcttgattgcagagtattttgaacacgttgaagaagctgtgtgggcagttgaaaccttgatagcatccggtaaacctgtggcagcaaccatgtgcattggcccagaaggagatttgcatggcgtgccccccggcgagtgtgcagtgcgcctggtgaaagcaggagcatccatcattggtgtgaactgccactttgaccccaccattagtttaaaaacagtgaagctcatgaaggagggcttggaggctgcccaactgaaagctcacctgatgagccagcccttggcttaccacactcctgactgcaacaagcagggattcatcgatctcccagaattcccatttggactggaacccagagttgccaccagatgggatattcaaaaatacgccagagaggcctacaacctgggggtcaggtacattggcgggtgctgtggatttgagccctaccacatcagggcaattgcagaggagctggccccagaaaggggctttttgccaccagcttcagaaaaacatggcagctggggaagtggtttggacatgcacaccaaaccctgggttagagcaagggccaggaaggaatactgggagaatcttcggatagcctcaggccggccatacaacccttcaatgtcaaagccagatggctggggagtgaccaaaggaacagccgagctgatgcagcagaaagaagccacaactgagcagcagctgaaagagctctttgaaaaacaaaaattcaaatcacagtagcctcgatagaagctatttttgatgaatttctaggtgtttgggtcacagttcctacaaatacggaaaagggggttaaaaagcagtgctttcatgaatgccatcctacacatattattgctattacctgaacaaaatagaattacaaatagcacttgataattttaaagtatgttttagaaattttcttaggagcaaaataagtacaaagtaaatcttgaacaggttcactaagcacccaccctgtgaaaagtattatggaaatcactgcagcacaggaaaagtaattcagatgttaatgccacttgaagaagttggtaggctagcaaagaggatgagacatgaactgtcataaaggactcagcaaccagccagggacagataaagcgctatggaaaggggcttccaagttcttttgaacatgacccttagtaacaaacacaatttatataatgacccagcaaaacacatcacatcttactgtcgaaattaaatgtgtgatccatcctagtattttctgttccattccttttcattctatttcatttataaaacatgctagttgagacttttcaaatggatttttatgacccactactgggtttggatccacagtttgaaaaatattgctacaagacacttaaggagaccatcctgtttaagtttattcttataagtaggtcagtcatatgagacctgatcaataaatatccaatacccagagtcctgctctcagagttcttctgtttcgtgacccacttttctaccagtaaaagacatagaccaatggggaggaggggaggagagatggatatttcagccctctccatcctagtcaacactggatccacctagtgcctctgggccataaggctgagcagagtgagcttgtattagttggtagcttttaaaaaatataataaaaaaaaagtagagattctccaaactctagcctggtttcctagattgagaactatgatatttttctctgataatttaatatctactctcctacaaaagctcaagcctgaagatacaagactattagaagaaacatgactaccctcagtgtattagaaaagaggtcatgcagctttctaaacattattgaattgtttgagctgttttgaaattgtaattcttttcagctattaaaaagaagagcaatgagaaaaaaaaaaaaaaaaaaaaa

SEQ ID NO: 6888 - DNA, 5767 bp, Homo sapiens
  misc_feature (1)..(5767): n=a,t,g or c
gagggaggagagttcacttttacttcagtgtcagcgcgcggcggccgtggctggctctggcgagagagcaccgagggagtgggtcgcagatcttcgggcggctaggggaaatcggcgagaggcgggatccgagcgcgccggcggggcgcagagcccgcgagcctggccagcgagggtagccgcggggggcgcgccccgggcgggcccccggagacgcgcaggatgccacacgaagagctgccgtcgctgcagagaccccgctatggctctattgtggacgatgaaaggctctctgcagaggagatggatgagaggaggcggcagaacattgcttatgaatatctgtgccacttagaggaagccaaaaggtggatggaagtttgcttagttgaagaattgccaccaaccactgaattggaagaagggctccggaatggagtttaccttgcaaagttagccaagttctttgccccgaaaatggtatcagagaaaaagatctatgatgtggaacaaacacgttataagaagtctggccttcattttcgacacacagataataccgtccagtggttaagagcgatggagtctattggtctacccaagatattttatccagaaacaacagatgtctatgatcggaaaaacataccaagaatgatatattgcattcacgcactgagtttgtatctgttcaaactaggaatagcaccccagatccaggatttgttgggcaaagtagacttcacagaggaggaaatcagtaatatgagaaaagaacttgagaaatatggaatacagatgccatctttcagcaaaataggtggtattctggccaatgaactgtccgtggatgaagctgcattacatgctgcagttatagccattaatgaagcagttgaaaaaggaatagcagagcaaaccgttgtaacactaagaaacccaaatgcggttttaactttagtggatgacaaccttgcaccagaatatcagaaagaactctgggatgccaaaaagaaaaaagaggaaaatgcaagactgaagaatagctgtatttcagaagaagaaagagatgcttatgaagaactgctgacacaagcagaaatccaaggcaatattaataaagtcaacaggcaggctgcagtggaccatatcaatgctgtcattccggaaggtgaccccgagaatacgctgcttgcactgaagaaaccagaggcccagctgcctgctgtttatccctttgctgctgccatgtatcagaacgaacttttcaacctccagaaacagaacaccatgaactacttggcccacgaggagcttttgattgctgtggaaatgttgtctgctgttgctttactaaaccaggccttggaaagcaacgatcttgtgtctgtgcagaatcaactcagaagccccgcaataggcttaaacaatctggacaaggcatatgtggaacgttatgcaaacacactactctctgttaaactagaagttttatcccaagggcaagataacttaagctggaatgaaattcagaattgtattgatatggttaatgctcaaattcaagaagaaaatgaccgagttgtagctgtagggtacatcaatgaagctattgatgaagggaatcctttgaggactttagaaactttgctcctacctactgcgaatattagtgatgtggacccagcccatgcccagcactaccaggatgttttataccatgctaaatcacagaaactcggagactctgagagtgtttccaaagtgctttggctggatgagatacagcaagccgtcgatgaggccaacgtggacgaggacagagcaaaacaatgggttactctggtggttgatgttaatcagtgtttggaaggaaaaaaatcaagtgatattttgtctgtattgaagtcttccacttctaatgcaaatgacataatcccggagtgtgctgacaaatactatgatgcccttgtgaaggcaaaagagctcaaatctgaaagagtgtctagtgacggttcatggctcaaactcaacctgcacaaaaaatatgactactattacaacactgattcaaaagagagttcctgggtcacacctgaatcatgcttctataaagaatcatggctcacaggaaaagaaatcgaggacattattgaggaagtcacagtaggttacattcgtgagaatatatggtctgcttcagaagagttgcttcttcgctttcaagccacaagctcaggacccatccttagggaagagtttgaagctagaaaatcatttttgcatgaacaagaagagaatgtggtcaaaatacaggctttttggaaaggatataaacaacggaaggagtatatgcacaggcggcaaacgttcattgataatactgattctgttgtgaagattcagtcctggttccgaatggcaactgcaagaaagagctatctttcaagactacagtatttcagagatcataataatgaaattgtgaaaatacagtcactgttgagagcgaacaaagctagagatgactacaaaacattggttggctctgaaaacccaccattaacagtaattcgcaaatttgtatacctgctggaccaaagtgatttggatttccaggaggaactagaggttgcacgattaagggaagaagtagtgaccaagatcagggccaatcaacagctggaaaaagacctgaacctgatggacatcaagattggactgctggtgaagaacaggatcacactagaggatgtaatttcacacagtaaaaagctgaacaagaaaaaaggaggagaaatggaaatactgaataacaccgacaaccaaggaataaaaagtttgagtaaggagaggagaaaaacactagaaacatatcagcagctgttttaccttttacagaccaaccctttatacttggctaagctgattttccagatgccacagaacaagtccactaaatttatggatactgttattttcacactatataattatgcctctaatcagcgagaagaatatctacttctcaagctttttaaaactgctctggaggaagaaataaaatcaaaagtggaccaggtacaggacatagttactggtaaccctacagtcatcaagatggtcgtcagcttcaatagaggtgcccggggacagaacaccctgcgccaactcctggctccagtggtaaaagagatcatcgacgacaagtcgctgattatcaacacaaaccctgtagaggtgtacaaggcttgggtgaaccaactagaaacacagactggagaggccagcaagttgccttatgatgtgaccacagaacaagctctaacatacccagaagtgaaaaataaactggaggcttccattgagaacctgagaagggtcaccgacaaagtcctgaattctatcatttcttcccttgatctactgccttatggattgaggtatatagccaaagtactgaagaattcgatccatgagaaattccccgatgcaacagaagatgagctattaaagattgttggaaacctcctgtactatcggtacatgaatccagccattgtagctccagatggctttgatatcatcgacatgacagctggaggtcagataaattctgaccaaaggagaaacttaggatcagtggccaaggttcttcagcacgcagcctccaacaagctgtttgaaggagaaaatgagcatctctcatctatgaacaattatttatcagagacgtatcaggaattcaggaaatatttcaaagaagcatgtaatgtccctgagccagaagagaagtttaatatggacaaatacacagacctggtgacagtcagcaaaccagtcatttatatttcaattgaagaaatcatcagcacacactcactcctgttggaacaccaggatgcaattgcccctgagaaaaatgacttactgagtgaattgctggggtcgctgggagaggtgccaaccgtggaatcttttcttggggaaggagcagttgaccccaatgaccctaacaaggcaaatacactaagtcagctttcaaagaccgagatttctcttgtcttgacaagcaaatatgacatagaggacggtgaagctatagatagccgaagcctcatgataaagaccaagaagctgataattgatgtgatccggaaccagccagggaacacattgacagaaatcttagagacaccagcaactgcgcaacaggaggtagaccatgccacggacatggtgagccgtgcaatgatagattccaggactccagaagaaatgaagcatagccaatctatgattgaagatgcacagctgcctcttgagcagaagaagaggaaaatccagaggaatcttcggacgttggaacagactggacacgtgtcatccgaaaataaataccaagacattctcaatgagattgccaaggatattcgaaatcaaagaatctatcgtaagcttcgaaaagctgaattggcaaaacttcagcagaccctgaatgcacttaacaagaaggcagcattttatgaagagcaaatcaattattatgacacctacataaagacttgtttagacaacttaaaaagaaaaaatactcggagatcaattaaactagatggaaaaggagaacccaaaggggcgaagagagcgaagccagtgaagtacactgcagcaaagctgcatgagaaaggtgtcctgctagatatagatgatcttcaaacaaaccagtttaagaatgttacatttgatatcatagctactgaagatgtaggcattttcgatgtaagatcaaaattccttggtgttgagatggaaaaggtgcaactcaatattcaggatttacttcagatgcaatatgaaggagtagctgtaatgaaaatgtttgataaggttaaagtgaatgtaaaccttctcatatacctgctgaacaagaagttctatggaaagtgaagtgcctacagaaatttcttggattctgtatcatctggattaggaaatgaatttgtttaatatttttgtttttaaacatgattgaaatcactgcttataaatgtgtgattttttttaaatgaccaaaactgttctgaagaatgtacccaggtgcctttttgctaatttgatactataatagaatgagacataaaatgaattaatggaaacatatccacactgtactgtgatataggtactctgatttaaaactttggacatcctgtgatctgttttaaagttggggggtgggaaatttagctgactagggacaaacatgtaaacctattttcctatgaaaaaagttttaaatgtcccacttgaataacgtaattcttcatagtttttttaatctatggataaatggaaacctaattatttgtaatgaattatttagacagttctaagccctgtcttctgggagttatcaattttaaagagaacttttgtgcaattcaaatgaagtttttataagtaattgaaaatgacaacacaataacactttctgtataaaagtatatattttatgtgatttattcctactaaatgaaagtgcactactgcctcatgtaaagactcttgcacgcagagcctttaagtgactaaggaacaacatagatagtgagcatagtccccacctccacccctcacaatttatttgaatacttcaattgtgcctctcaattttttgtaatgctaaaaaatcagtatctagatggtttttaaatgtattctctggaaattgttttatgtaaaataaatgttacttaattccatt

SEQ ID NO: 6889 - DNA, 2017 bp, Homo sapiens
  misc_feature (1)..(2017): n=a,t,g or c
cggcccctcagggcacggctttagcggtgtcttttgcgagttcttcgtaagtacatcttaaagctgtcaagatggttctagcagaccttggaagaaaaataacatcagcattacgctcgttgagcaatgccaccattatcaatgaagaggtattgaatgctatgctaaaagaagtctgtaccgctttgttggaagcagatgttaatattaaactagtgaagcaactaagagaaaatgttaagtctgctattgatcttgaagagatggcatctggtcttaacaaaagaaaaatgattcagcatgctgtatttaaagaacttgtgaagcttgtagaccctggagttaaggcatggacacccactaaaggaaaacaaaatgtgattatgtttgttggattgcaagggagtggtaaaacaacaacatgttcaaagctagcatattattaccagaggaaaggttggaagacctgtttaatatgtgcagacacattcagagcaggggcttttgaccaactaaaacagaatgctaccaaagcaagaattccattttatggaagctatacagaaatggatcctgtcatcattgcttctgaaggagtagagaaatttaaaaatgaaaattttgaaattattattgttgatacaagtggccgccacaaacaagaagactctttgtttgaagaaatgcttcaagttgctaatgctatacaacctgataacattgtttatgtgatggatgcctccattgggcaggcttgtgaagcccaggctaaggcttttaaagataaagtagatgtagcctcagtaatagtgacaaaacttgatggccatgcaaaaggaggtggtgcactcagtgcagtcgctgccacaaaaagtccgattattttcattggtacaggggaacatatagatgactttgaacctttcaaaacacagccttttattagcaaacttcttggtatgggcgacattgaaggactgatagataaagtcaacgagttgaagttggatgacaatgaagcacttatagagaagttgaaacatggtcagtttacgttgcgagacatgtatgagcaatttcaaaatatcatgaaaatgggccccttcagtcagatcttggggatgatccctggttttgggacagattttatgagcaaaggaaatgaacaggagtcaatggcaaggctaaagaaattaatgacaataatggatagtatgaatgatcaagaactagacagtacggatggtgccaaagtttttagtaaacaaccaggaagaatccaaagagtagcaagaggatcgggtgtatcaacaagagatgttcaagaacttttgacacaatataccaagtttgcacagatggtaaaaaagatgggaggtatcaaaggacttttcaaaggtggcgacatgtctaagaatgtgagccagtcacagatggcaaaattgaaccaacaaatggccaaaatgatggatcctagggttcttcatcacatgggtggtatggcaggacttcagtcaatgatgaggcagtttcaacagggtgctgctggcaacatgaaaggcatgatgggattcaataatatgtaaagaaaatgtccttaatataaactgactcagttgaatacctaatttgctgagacctcagcgtttcccttctttttgcgaattggggggaaagtgtatttttcttgcttatcatgcactctttccttttcttctcgcccgcttttcccctccttttctttttccttccttctttcctccctttaatataagggagaaatacatggtttttgtggaaatcattatatgtttgctttagattttgttctgttttcaccatcataacacttaagttaaatcatgatgtaaaattttagtacttaaaggtttttaattatctcgaaggccaagcattgcatttgtaaacagtcctggtcagtagttaaataatgtttcaattaaagtgctgtaaaataaacttcaaagtggttataagttaaaaaaaaaaaaaaagg

SEQ ID NO: 6890 - DNA, 1280 bp, Homo sapiens; identical to SEQ ID NO: 6597
  misc_feature (1)..(1280): n=a,t,g or c

SEQ ID NO: 6891 - DNA, 1493 bp, Homo sapiens
  misc_feature (1)..(1493): n=a,t,g or c
ggaagatgtagattccttcatgaaacagcctgggaatgagactgcagatacagtattaaagaagctggatgaacagtaccagaagtataagtttatggaactcaaccttgctcaaaagaaaagaaggctaaaaggtcagattcctgaaattaaacagactttggaaattctaaaatacatgcagaagaaaaaagagtccaccaactcaatggagaccagattcttgctggcagataacctgtattgcaaagcttcagttcctcctaccgataaagtgtgtctgtggttgggggctaatgtaatgcttgaatatgatattgatgaagctcaggcattgttggaaaagaatttatcgactgccacaaagaatcttgattccctggaggaagaccttgactttcttcgagatcaatttactaccacagaagtcaatatggccagggtttataattgggatgtaaaaagaagaaacaaggatgactctaccaagaacaaagcataatgctggcaattaaaaatgtggtttagttttccaaacatgttatcttaaatacccctttatccttacaggttgacataactttgaatgttttaacagcaagaattttaagaaaagataaacaccattttatttatttataaaaacaaaattagtttcaaatatttttgacattgtgatttttttttccacatttctcagcaaagctaatggtattttaatatcattattttttgcctgtcataagaaaactcttagctgaaatggccgaaaactgtgagacatgctatggaagctgaatgccggacgctagcacagtttactttttccctttctaattggctgatgttactctcacttgatgtggttaaaccattttagaggtagagaagacagacagtttgaatatttgtaaacttgtttttctttggtatatttaggacttagtggtcctctgttgctattgtcttctataagtggagtttcatgacttactgcttaacgaataactaactactatgatattctggacattttaggaaatggtaatttgccttgctacacattaagagggctattaagactacattttttctaacctcagataagtgcagtgtctttgcaatgccaacataagggagatcttggccaacgtgaaataaaattactcattcaaaactctgcctaaggtgattttgtagttcttaacagttctccagagcatcttgaacaggaatattaagataaatgtgaatctgcaatggctgaaaagagttgtgagcttttttattcatgataaaaccttataggaatagtataaaaaatccctgtggaaagctactagtacattgaccagcgctgggtgatacagattctgataaaaacataaatgtattagttcatctccatgtagtaaaaagtatacttatacaatgttttgtacttgtatttcatgaaattaaaacagtgatgctaaaacggccttcgtggcctc

SEQ ID NO: 6892 - DNA, 2092 bp, Homo sapiens
  misc_feature (1)..(2092): n=a,t,g or c
attttaggtctcgaaggaagatcagtctatgaagaagattttgaggctccttttttggaaatgtctgcagaattttttcagatggaaagccagaaatttttagcagaaaatagtgcttcagtatatataaagaaagtagaagctagaattaatgaagaaatagaacgagtgatgcactgccttgacaaatcaacggaagaaccaattgtaaaggtggttgaaagggaactcatttccaagcacatgaagactatagtagaaatggagaattctgggctagtacatatgttgaaaaatggaaagacagaagaccttggttgcatgtacaagttatttagtcgtgtgccaaatggtttgaaaacaatgtgtgagtgtatgagttcctatttgagggagcaaggtaaagctcttgtttctgaagaaggagaaggaaagaatcctgttgactatatccagggcttattggatctgaagagtaggttcgatcgcttcctcctggaatcattcaacaatgaccgtctctttaaacaaactattgcgggtgactttgagtattttctcaacctcaactccaggtctcctgaatacctctcattatttattgatgataagctgaaaaagggagtcaaagggctaacagaacaagaagtagaaacaatattggataaagcaatggtcctttttaggtttatgcaagaaaaagatgtatttgaacgttattataaacaacacttggcaaggagacttctcacaaataaaagtgtttctgatgactctgaaaaaaacatgatatctaagttaaagactgaatgtggatgtcagttcacgtcaaaactggaaggaatgtttagggatatgagcatctcaaacacaacgatggatgaattcaggcaacatctacaggcaactggtgtatctttaggtggtgttgatcttacagtccgggtgctcacgacaggatattggcccactcagtcagccacaccaaagtgcaacatcccaccagcaccaagacatgcttttgagatattcagaaggttctacttagccaaacacagtggtcgacagctcacactccagcatcatatgggttctgcagatctcaatgccacattttatggaccagttaaaaaggaagatggatctgaagttggtgttggaggtgcacaagtaactggctctaatacacggaagcacatattgcaagtttccactttccagatgaccatattaatgctctttaataatagagaaaaatacacatttgaggaaattcagcaagagacagatatccctgaaagagagcttgttagagccctacagtccctcgcctgtggtaaaccaacacagcgggttcttacaaaagaacccaaatcaaaggaaatagaaaatggtcatatatttacagttaatgatcaattcacatccaaactacacagagtcaagattcaaacagttgctgccaaacaaggtgaatccgacccagagaggaaagaaacaaggcagaaagtagacgacgacagaaaacatgagatagaagctgctatagtgcggataatgaaatctagaaagaagatgcagcacaatgttctagtagcggaggtaactcagcagttgaaggcgcgattcttaccaagtccagttgttattaagaaacgtattgaaggacttattgagagagaatatttggcacgaacacctgaggatcgcaaagtatacacatatgtagcataaaatgcgttcagaaatttgatttattcttggactgtactcttcgcatggactgggaagttcttttaaatcattaaatattaagacgaccatctcttctattaaattacagtacatgttctagaccattgagatcaagcctttactccctttgagagtttccaacatcagttgattgagcttcaggctttacaacgtttatccctgtagagatcatctttacagttcctcgggaaaatgtgaatgtgctgcgttttgttttctttactgtatgaaaacagggaaataaaagaggaatttaggaaatacagctcattacaataaaattgttggatttcatttcaaaaaaaaaaaaaaaaaa

SEQ ID NO: 6893 - DNA, 3362 bp, Homo sapiens; identical to SEQ ID NO: 6598
  misc_feature (1)..(3362): n=a,t,g or c

SEQ ID NO: 6894 - DNA, 6981 bp, Homo sapiens
  misc_feature (1)..(6981): n=a,t,g or c
ttgctgcgtcaactgtgttccctttggcctggctgagtttgatactgtggggattcagtttaggcgctggcccgaggatatcccagcggtggtacttcggagacacctgtctgcatctgactgagccggctctcctggcctcgcgctgcacattctctcctggcggcggcgccacctgcagtagcgttcgcccgaacatggcgacacggagcagcaggagggagtcgcgactcccgttcctattcaccctggtcgcactgctgccgcccggagctctctgcgaagtctggacgcagaggctgcacggcggcagcgcgcccttgccccaggaccggggcttcctcgtggtgcagggcgacccgcgcgagctgcggctgtgggcgcgcggggatgccaggggggcgagccgcgcggacgagaagccgctccggaggaaacggagcgctgccctgcagcccgagcccatcaaggtgtacggacaggttagtctgaatgattcccacaatcagatggtggtgcactgggctggagagaaaagcaacgtgatcgtggccttggcccgagatagcctggcattggcgaggcccaagagcagtgatgtgtacgtgtcttacgactatggaaaatcattcaagaaaatttcagacaagttaaactttggcttgggaaataggagtgaagctgttatcgcccagttctaccacagccctgcggacaacaagcggtacatctttgcagacgcttatgcccagtacctctggatcacgtttgacttctgcaacactcttcaaggcttttccatcccatttcgggcagctgatctcctcctacacagtaaggcctccaaccttctcttgggctttgacaggtcccaccccaacaagcagctgtggaagtcagatgactttggccagacctggatcatgattcaggaacatgtcaagtccttttcttggggaattgatccctatgacaaaccaaataccatctacattgaacgacacgaaccctctggctactccactgtcttccgaagtacagatttcttccagtcccgggaaaaccaggaagtgatccttgaggaagtgagagattttcagcttcgggacaagtacatgtttgctacaaaggtggtgcatctcttgggcagtgaacagcagtcttctgtccagctctgggtctcctttggccggaagcccatgagagcagcccagtttgtcacaagacatcctattaatgaatattacatcgcagatgcctccgaggaccaggtgtttgtgtgtgtcagccacagtaacaaccgcaccaatttatacatctcagaggcagaggggctgaagttctccctgtccttggagaacgtgctctattacagcccaggaggggccggcagtgacaccttggtgaggtattttgcaaatgaaccatttgctgacttccaccgagtggaaggattgcaaggagtctacattgctactctgattaatggttctatgaatgaggagaacatgagatcggtcatcacctttgacaaagggggaacctgggagtttcttcaggctccagccttcacgggatatggagagaaaatcaattgtgagctttcccagggctgttcccttcatctggctcagcgcctcagtcagctcctcaacctccagctccggagaatgcccatcctgtccaaggagtcggctccaggcctcatcatcgccactggctcagtgggaaagaacttggctagcaagacaaacgtgtacatctctagcagtgctggagccaggtggcgagaggcacttcctggacctcactactacacatggggagaccacggcggaatcatcacggccattgcccagggcatggaaaccaacgagctaaaatacagtaccaatgaaggggagacctggaaaacattcatcttctctgagaagccagtgtttgtgtatggcctcctcacagaacctggggagaagagcactgtcttcaccatctttggctcgaacaaagagaatgtccacagctggctgatcctccaggtcaatgccacggatgccttgggagttccctgcacagagaatgactacaagctgtggtcaccatctgatgagcgggggaatgagtgtttgctgggacacaagactgttttcaaacggcggaccccccatgccacatgcttcaatggagaggactttgacaggccggtggtcgtgtccaactgctcctgcacccgggaggactatgagtgtgacttcggtttcaagatgagtgaagatttgtcattagaggtttgtgttccagatccggaattttctggaaagtcatactcccctcctgtgccttgccctgtgggttctacttacaggagaacgagaggctaccggaagatttctggggacacttgtagcggaggagatgttgaagcgcgactggaaggagagctggtcccctgtcccctggcagaagagaacgagttcattctgtatgctgtgaggaaatccatctaccgctatgacctggcctcgggagccaccgagcagttgcctctcaccgggctacgggcagcagtggccctggactttgactatgagcacaactgtttgtattggtccgacctggccttggacgtcatccagcgcctctgtttgaatggaagcacagggcaagaggtgatcatcaattctggcctggagacagtagaagctttggcttttgaacccctcagccagctgctttactgggtagatgcaggcttcaaaaagattgaggtagctaatccagatggcgacttccgactcacaatcgtcaattcctctgtgcttgatcgtcccagggctctggtcctcgtgccccaagagggggtgatgttctggacagactggggagacctgaagcctgggatttatcggagcaatatggatggttctgctgcctatcacctggtgtctgaggatgtgaagtggcccaatggcatctctgtggacgaccagtggatttactggacggatgcctacctggagtgcatagagcggatcacgttcagtggccagcagcgctctgtcattctggacaacctcccgcacccctatgccattgctgtctttaagaatgaaatctactgggatgactggtcacagctcagcatattccgagcttccaaatacagtgggtcccagatggagattctggcaaaccagctcacggggctcatggacatgaagattttctacaaggggaagaacactggaagcaatgcctgtgtgcccaggccatgcagcctgctgtgcctgcccaaggccaacaacagtagaagctgcaggtgtccagaggatgtgtccagcagtgtgcttccatcaggggacctgatgtgtgactgccctcagggctatcagctcaagaacaatacctgtgtcaaagaagagaacacctgtcttcgcaaccagtatcgctgcagcaacgggaactgtatcaacagcatttggtggtgtgactttgacaacgactgtggagacatgagcgatgagagaaactgccctaccaccatctgtgacctggacacccagtttcgttgccaggagtctgggacttgtatcccactgtcctataaatgtgaccttgaggatgactgtggagacaacagtgatgaaagtcattgtgaaatgcaccagtgccggagtgacgagtacaactgcagttccggcatgtgcatccgctcctcctgggtatgtgacggggacaacgactgcagggactggtctgatgaagccaactgtaccgccatctatcacacctgtgaggcctccaacttccagtgccgaaacgggcactgcatcccccagcggtgggcgtgtgacggggatacggactgccaggatggttccgatgaggatccagtcaactgtgagaagaagtgcaatggattccgctgcccaaacggcacttgcatcccatccagcaaacattgtgatggtctgcgtgattgctctgatggctccgatgaacagcactgcgagcccctctgtacgcacttcatggactttgtgtgtaagaaccgccagcagtgcctgttccactccatggtctgtgacggaatcatccagtgccgcgacgggtccgatgaggatgcggcgtttgcaggatgctcccaagatcctgagttccacaaggtatgtgatgagttcggtttccagtgtcagaatggagtgtgcatcagtttgatttggaagtgcgacgggatggatgattgcggcgattattctgatgaagccaactgcgaaaaccccacagaagccccaaactgctcccgctacttccagtttcggtgtgagaatggccactgcatccccaacagatggaaatgtgacagggagaacgactgtggggactggtctgatgagaaggattgtggagattcacatattcttcccttctcgactcctgggccctccacgtgtctgcccaattactaccgctgcagcagtgggacctgcgtgatggacacctgggtgtgcgacgggtaccgagattgtgcagatggctctgacgaggaagcctgccccttgcttgcaaacgtcactgctgcctccactcccacccaacttgggcgatgtgaccgatttgagttcgaatgccaccaaccgaagacgtgtattcccaactggaagcgctgtgacggccaccaagattgccaggatggccgggacgaggccaattgccccacacacagcaccttgacttgcatgagcagggagttccagtgcgaggacggggaggcctgcattgtgctctcggagcgctgcgacggcttcctggactgctcggacgagagcgatgaaaaggcctgcagtgatgagttgactgtgtacaaagtacagaatcttcagtggacagctgacttctctggggatgtgactttgacctggatgaggcccaaaaaaatgccctctgcttcttgtgtatataatgtctactacagggtggttggagagagcatatggaagactctggagacccacagcaataagacaaacactgtattaaaagtcttgaaaccagataccacgtatcaggttaaagtacaggttcagtgtctcagcaaggcacacaacaccaatgactttgtgaccctgaggaccccagagggattgccagatgcccctcgaaatctccagctgtcactccccagggaagcagaaggtgtgattgtaggccactgggctcctcccatccacacccatggcctcatccgtgagtacattgtagaatacagcaggagtggttccaagatgtgggcctcccagagggctgctagtaactttacagaaatcaagaacttattggtcaacactctatacaccgtcagagtggctgcggtgactagtcgtggaataggaaactggagcgattctaaatccattaccaccataaaaggaaaagtgatcccaccaccagatatccacattgacagctatggtgaaaattatctaagcttcaccctgaccatggagagtgatatcaaggtgaatggctatgtggtgaaccttttctgggcatttgacacccacaagcaagagaggagaactttgaacttccgaggaagcatattgtcacacaaagttggcaatctgacagctcatacatcctatgagatttctgcctgggccaagactgacttgggggatagccctctggcatttgagcatgttatgaccagaggggttcgcccacctgcacctagcctcaaggccaaagccatcaaccagactgcagtggaatgtacctggaccggcccccggaatgtggtttatggtattttctatgccacgtcctttcttgacctctatcgcaacccgaagagcttgactacttcactccacaacaagacggtcattgtcagtaaggatgagcagtatttgtttctggtccgtgtagtggtaccctaccaggggccatcctctgactacgttgtagtgaagatgatcccggacagcaggcttccaccccgtcacctgcatgtggttcatacgggcaaaacctccgtggtcatcaagtgggaatcaccgtatgactctcctgaccaggacttgttgtatgcaattgcagtcaaagatctcataagaaagactgacaggagctacaaagtaaaatcccgtaacagcactgtggaatacacccttaacaagttggagcctggcggaaaataccacatcattgtccaactggggaacatgagcaaagattccagcataaaaattaccacagtttcattatcagcacctgatgccttaaaaatcataacagaaaatgatcatgttcttctgttttggaaaagcctggctttaaaggaaaagcattttaatgaaagcaggggctatgagatacacatgtttgatagtgccatgaatatcacagcttaccttgggaatactactgacaatttctttaaaatttccaacctgaagatgggtcataattacacgttcaccgtccaagcaagatgcctttttggcaaccagatctgtggggagcctgccatcctgctgtacgatgagctggggtctggtgcagatgcatctgcaacgcaggctgccagatctacggatgttgctgctgtggtggtgcccatcttattcctgatactgctgagcctgggggtggggtttgccatcctgtacacgaagcaccggaggctgcagagcagcttcaccgccttcgccaacagccactacagctccaggctggggtccgcaatcttctcctctggggatgacctgggggaagatgatgaagatgcccctatgataactggattttcagatgacgtccccatggtgatagcctgaaagagctttcctcactagaaaccaaatggtgtaaatattttatttgataaagatagttgatggtttattttaaaagatgcactttgagttgcaatatgttatttttatatgggccaaaaacaaaaaaaaaaaaaaaaaa

SEQ ID NO: 6895 - DNA, 2016 bp, Homo sapiens
  misc_feature (1)..(2016): n=a,t,g or c
ggcacgaggagcagcgcccgcgccctccgcgccttctccgccgggacctcgagcgaaagacgcccgcccgccgcccagccctcgcctccctgcccaccgggcccaccgcgccgccaccccgaccccgctgcgcacggcctgtccgctgcacaccagcttgttggcgtcttcgtcgccgcgctcgccccgggctactcctgcgcgccacaatgagctcccgcatcgccagggcgctcgccttagtcgtcacccttctccacttgaccaggctggcgctctccacctgccccgctgcctgccactgccccctggaggcgcccaagtgcgcgccgggagtcgggctggtccgggacggctgcggctgctgtaaggtctgcgccaagcagctcaacgaggactgcagcaaaacgcagccctgcgaccacaccaaggggctggaatgcaacttcggcgccagctccaccgctctgaaggggatctgcagagctcagtcagagggcagaccctgtgaatataactccagaatctaccaaaacggggaaagtttccagcccaactgtaaacatcagtgcacatgtattgatggcgccgtgggctgcattcctctgtgtccccaagaactatctctccccaacttgggctgtcccaaccctcggctggtcaaagttaccgggcagtgctgcgaggagtgggtctgtgacgaggatagtatcaaggaccccatggaggaccaggacggcctccttggcaaggagctgggattcgatgcctccgaggtggagttgacgagaaacaatgaattgattgcagttggaaaaggcagctcactgaagcggctccctgtttttggaatggagcctcgcatcctatacaaccctttacaaggccagaaatgtattgttcaaacaacttcatggtcccagtgctcaaagacctgtggaactggtatctccacacgagttaccaatgacaaccctgagtgccgccttgtgaaagaaacccggatttgtgaggtgcggccttgtggacagccagtgtacagcagcctgaaaaagggcaagaaatgcagcaagaccaagaaatcccccgaaccagtcaggtttacttacgctggatgtttgagtgtgaagaaataccggcccaagtactgcggttcctgcgtggacggccgatgctgcacgccccagctgaccaggactgtgaagatgcggttccgctgcgaagatggggagacattttccaagaacgtcatgatgatccagtcctgcaaatgcaactacaactgcccgcatgccaatgaagcagcgtttcccttctacaggctgttcaatgacattcacaaatttagggactaaatgctacctgggtttccagggcacacctagacaaacaagggagaagagtgtcagaatcagaatcatggagaaaatgggcgggggtggtgtgggtgatgggactcattgtagaaaggaagccttgctcattcttgaggagcattaaggtatttcgaaactgccaagggtgctggtgcggatggacactaatgcagccacgattggagaatactttgcttcatagtattggagcacatgttactgcttcattttggagcttgtggagttgatgactttctgttttctgtttgtaaattatttgctaagcatattttctctaggcttttttccttttggggttctacagtcgtaaaagagataataagattagttggacagtttaaagcttttattcgtcctttgacaaaagtaaatgggagggcattccatcccttcctgaagggggacactccatgagtgtctgtgagaggcagctatctgcactctaaactgcaaacagaaatcaggtgttttaagactgaatgttttatttatcaaaatgtagcttttggggagggaggggaaatgtaatactggaataatttgtaaatgattttaattttatattcagtgaaaagattttatttatggaattaaccatttaataaagaaatatttacct

SEQ ID NO: 6896 - DNA, 1156 bp, Homo sapiens
  misc_feature (1)..(1156): n=a,t,g or c
ggcacgaggaagagcggtcggcggggtttcttcgttgcattgcctgagaggagcggagtctgccaggtggtgtccatcatgttctctttcaacatgttcgaccaccctattcccagggtcttccaaaaccgcttctccacacagtaccgctgcttctctgtgtccatgctagcatggcctaatgacaggtcagatgtggagaaaggagggaagataattatgccaccctcggccctggaccaactcagccgacttaacattacctatcccatgctgttcaaactgaccaataagaattcggaccgcatgacgcattgtggcgtgctggaatttgtggctgatgaaggcatctgctacctcccacactggatgatgcagaacttactcttggaagaagacggcctggtccagttggagaccgtcaaccttcaagtggccacctactccaagagtaagttctgctacctcccacactggatgatgcagaacttactcttggaagaaggcggcctggtccaggtggagagcgtcaaccttcaagtggccacctactccaaattccaacctcagagcgctgacttcctggacatcaccaaccccaaagccgtattagaaaacgcacttaggaactttgcctgtctgaccaccggggatgtgattgccattaactacaatgaaaagatctacgaactgcgtgtgatggagaccaaacccgacaaggcagtgtccattcatgagtgtgacatgaacgtggactttgatgctcccctgggctacaaagaacccgaaagacaagtccagcatgaggagtcgacagaaggtgaagccgaccacagtggctatgctggagagcttggcttccgcgctttctctggatctggcaatagactggatggaaagaagaaaggggtagagcccagcccctccccaatcaagcctggagatattaaaagaggaattcccaattatgaatttaaacttggtaagataactttcatcagaaattcacgtccccttgtcaaaaaggttgaagaggatgaagctggaggcagattcgtcgctttctctggagaaggacagtcattgcgtaaaaagggaagaaagccctaagtgaggactgttggctgattggaaaataataaaagtttcatttgca

SEQ ID NO: 6897 - DNA, 267156 bp, Homo sapiens
  misc_feature (1)..(267156): n=a,t,g or c
gatcttggctcgctgcaagctccgcctcctgggttcacgccattctcccacctcagcctcccgagtagctgggactacaggcgcccaccaccacgcccggctaattttgttttagtatttttagtagggacagggtttcaccatgttagccaggacggtctcgagctcctgacctcgtgatgcgcccgcctcggcctcccaaaatgctgggattacagtcgtgagccaccgcgcccagcccagcaaaggctacctttttaagatgtatggtaataaaaaggagatgcggtagtagctcgatataaatagaattaggtaaaagtattatcagaacagagtactctggagcataaatgtagcttgaaaaagcagagaaggtatagggaagaatcgatggaataaattctacagaggcagaagtgcttggaatctggagcactgtgggaggatgagctaagagtagggagagaagaatggtgaaggtgaagattgatgacgactttgacgacagtgagcaatcaattttaagcacttattgtgcacaagccgaacattatgtaccttattgccactaactaggtactattatctccattctatagatgataaaatgttaagtaacttgtctgagtttgcacagctattaagtacaagagttgggatttcaacccatgtctacctgacttgggagcctaaattcctaaccactcgcctctgctttatcatcatagtctttaacaccactgctatgtgaactcctatgactacatgcttgctgtctcgcacagaataaccaaacagtagtctccacacttcaggtaatctatcctttgttcaacccagattctcttgcatttgtaaccttctgacctccccggcaaggtacccatttgcatttgcacatccccacactaacatgcagtgaaatagtctcttagccactctcttcagtgctcctcagagaggtgacaatcatcagtaactgtgaccccattgagagtgtggtttctgaccacgctcaagattatttgctgcaattgaagcagttagtagttgcttattcttttcttttccttgtttgcagatacctatgaaaatggaaattattttttggcaaactttatagcagctcaggtaagactaatttactacattttacaaatcttttcccaggtgtctacagattaaacattacagttaactgcgtaaatgtaatatcccacatcttaataggaggttcttcttgcctttacttttataatccaggtctgttgtcattaaagtaaggaagaaacaatccttactttggcagttttccagtatactatctccatgaaaagaaacttggaattcatacaatgctggggaaaaaatggggccttaaatgtgtaacatgttttccaaagatgagaaatttactagctgataaattttgaaagaaaaatgctatataagctacttattatgcaataatgcataaaagacgacctcaaaaccttagtggtatctaacaataagcacttacttagctcatgagcttgcagggctcagaggatgtgggtctggtcttggctgatctttgctagctcacatacatctccagttagtcttgggtctattgggctgtttagataatcttggctgtattcacatatctggggggtcagctgactctcatatgatttatcatggccttgtgggaaggtctaggcacggcttcttcataattatggaagagggctaaaataaaaataaaagtggagatcccttagttctttataatttttttgtatcgagttgactaatttcccattaccaaagcaaaatcacatggtcaagcccagagacagaggagggacagaatgcctcaactggagtgggagggcattgcaaaactgcatggaaaggggtatggatttgtaagggttgaatatttcataacagtgatgcaatcaatgcaccttgcatattaaatatcccattggtaatctacataattttaattagagtatgaggagaatcattctaggtcaaactggattctgcttctctatttttacctagtcactttaaccaagaagtaatatagcacaaatctattttttttctataacagtgattcacatatttgaagatgtctctcagttatttcttttgtcttcttagaattatacatcaccaggctaacttcatattttctctatttcctgcttatagtggtttccaggtctgatcattctgtttagactccagttaacttagatttcttttaaaacatcagaaccgagagcatattttagagctgtctatccagtatgatagccactagccacatgtggctattgaacacttgaaatgtgaccagcctaatttgaaatattcaaaagttagcttaaaaaattcaaaaatgatttgtgggcttcctgggcaagatggccaaataggaacagctctggcctgcagctcccagtgagatcaatgcagaaggcaggtgatttctgcatttccaactgagatacctggttcatctcactgggactgattagacagtgggtgaagtccacagagggcgaggagaagcagggtgtggtgtcacctcccccaggaagcacaaggggtcagggtactccccccgtagccaaaggaagccacgagggacagtgctatctggcccagatactacacttttcccatggtctttgcaacccatagagcaggagattccctcaggtgcctacaccaccaggaccctgggtttcaagcacaaaactgagtggccgtttgggcagataccaaactagcttcaggagtttttttttttcataccctagtggtgcctggaacaccagtgagacagaaccattcactcccctggaaagccagggagccgagtgcccttgctcagcggatcccaaccccacagagcccagcaagctaagatccacaggcttgaaatactcgccgccagcacagctgtctgaagttgacgtgggaagctcgagtttggtggagggaggggcatccgccattactgaggcttgagtaggcggttttcccctcacagtgtaaacaaagccaccaggaagttcgaactgggcagagcccaccacagctccacaaagccgctgtagcaagactgcctttctagattcctcctgtctgggcagggcatctctgaaaaaaaggcagcagccccagttaggggcttgtagataaaactcccatctctctgggacagacacctgggggaaggggctgctgtggatgcagcttcagcagacttaaaccttcctgcctgccagctctgaagagagcagtggatctcccagcacagtgctggagctctgctaagggacagactgcctcctcaagtgggtccctgacccccgtgcctcctgacagggagatacctcccagcaggggtcaacagacacctcatacaggagagctccagctggaatctggtgggtgcccctctgggatgaagcttccagaggaaggagcaggcagcaatcttaactgttctgcagtctccactggtgatacccaggcaaacatggtctggagtggacctccagcaaactccagcagacctgcagaagaggggcctgactattagaaggaaaactaacaaacggaaagcaatagcatcaacatcaacaaaaaggatgaccatgcaaaaaatccatccgaaggtcaccaacagcaaagaccaaaggtagataaatccacgaagatgaggaaaacccagtgcaaaaagcctaaagattccaaaaaccagaatgccccttctcctccaaaggatcacaactcctcaccagcaagggaacaaaactggagagagaacgaatttgatgaactgacagaaataggcttcagaaggtgggtaataacaagctcctccgagctaaaggagcatgttctaacccaatgcaaggaagctaagaaccttgataaaaggttagaggaattgctaactagaataaccagtttagagagaacataaatgacctgatggagctgaaaaatatagcatgagaacttcgtgaagcaaacacaagtatcaatcactgaatagatcaagcaaaagaaaggatatcagagattgaacagcaacttaatgaaataaagcgtgaagacaaaattagagaaaaaagaatgaaaaggaacaaacaaagcctccaagaaatatgggactatgtgaaaagaccaaacctacatttgattggtgtagctgaaagtgacgaggagaatggaaccaagttgtaaagcacacttcaaggtattatccaggagaattttccaacctagcaagacaggccaacattcaaattcaggaaatacagagaacaccacaaaaatattcctcaagaagagcaaccccacgacacataattgtcagattcaccaaggttgaaatgaaggaaaaaatgttaaggtcagccagagaggaaggttgggttacccacaaagggaagcccatcagactaacagcagatctgtctgcagaaacctcacaagccagaagagaatgggggccaatattcaacattcttaaagaaaagaattttcaacccagaatttcaaatccagccaaactaagcttcataagtgaaggggaaataaaatcctttacaagcaatccatttacaagcaaatgctgagggatttggtcaccactaggcctgccttacaagagctcctgaaggaagcactaaatatggaaaaggaaaaatgagtatcagctcctgcaaaaataaaccaaaatgtaaagaccattgacactatgaagaaactgcatcaactaatgggcaaaataaccagctagcatcataatgacaggatcaaattcacaaatagcagtattaaccttaaatgtaaatgggctaaatgctctgattaaaaggcacagactggcaaattggataaagagtcaagacccactggtgtgctgtattcagaagacccatctcatgtgcaaagacacactaggctcaaaataaagggatggaggaagatttgcccatcaaatgggaagtaaaaagaaaaagcaggggttgcaattttcatctctgataaaacagattttaaaccaacaaatatcaaaaaagacaaagaaggccattacataatgttaagagctaactaccataaatatatatgcacccaatacagaagcacccacattcataaggcaagtccttagagacctacaaagagacttagactctcacacaataatagtgggagattttaacacccactgtcaatattagacagaccaacaagacaggaaattagcaaggatattcagaacttgaactcagctctggaccaagcagatgtaatagacatctacagaactctccaccctaaatcaacagaatatacattcttctcagcaccaatagcacttattcgaaaatcaaccacataattggaagtaatacgctcctcagaaaatgaaaaagaacagaaatcataacaaagagtctctcagaccgcagtgcaatcaaattagaactcaggattaagaaactcactcaaaaccacacaactacagggaaactgaacaacctgctcctggatgactactgagtaaataatgaaattaaggcagaaataaataagttctttgaaaccaacaaaaacaaagacacaacatatcaaaatctctgggagttttcagagggaaatttatagcactaaatgcccacaggagaaaacaggaaggatctaaaatcaacaccctaacatcatagttaaaagagctagagaagcaagggcaaaaaagttcaaaagctagcagaagacaaaaaataactaagatcagagcagaactgaaggagagagagacacgaaatacccttcaaaaaaatcagtgactccaggagctggttttttgaaatgattaacagaatagttagaccgctagccagactaataaagaaaaaaagagagaagaatcaaatagacacaataaaaaatggtagagaggagatcaccgctgatcccacagaaatacaaactaccatcagagaatactataaacatataaacacctctatgcaaataaactagaaaatctagaagaaattgataaattcctggacacatacaccctctgaaggtaaaaccagggagaagttgaatccctgagtagaccaataacaaggtctgaaattgaggcactaaattaagagcctaccaaccaaaacagcccaggaccagacagattcacagccgaattctaccagaagtacaaagaggaactggtaccgttcctcctgaaactattccaaacaagagggactctgccctaactcattttatgaggtcagcatcatcctgataccaacacctggcagagacacaataaaaaaagaaaatttcaggccagtatccctgatgaacatcaatgcaaaagtcctccataaaatactggcaaaccgaatccagcagcacatcaaaaagccatgatcaagttggcttcatccttgggatgcaaggctggttcaacatatgcaagtcaataattgcaatccatcacataaacagaaccaatgacaaaaaccacatgattatctcaatagattcagaaaaggcctttgataaaattcaacaccctttcatgctaaaaacactcaataaactgggtattgatggaacaaatataaaaataatatgagctatttatgacaaaccaacagctaatatcatattgaataggaaaaagctggaagctttccctttgaaaaccggcacaagacaaggatgccctctctcaccactcctattcagcatagtattggaagttctggccagggcaatcaggcaagagaaagaaataaagcttattcaaataggaagagaggaagccaaattatctctatttgcagatgatgtgattgtatatttagaaaaccccattgtctcagccgaaaatctcattaaggtgataagcaacttcagcaaagtctcaggatacaaaatcaatgtgcaaaaatcacaagcatttcgatacaccaataatagacagccaaatcatgagcaaactcccactcacaattgctacaaagagaagaagatacctaggaatacaacttacaagggatgtgaaggacctcttcaaggagaactacaaaccactactcaaggatataagagaggacacaagcaaatggaaaaacattccatgctcatggataggaagaatcagtatcgtgaaaatggtcatacttcccaatgcaaatcaaaaccacaatgagatatcatctcatgccagttagaatggccattatcaaaaagtcaggaaacagcagatgctggagaggatgtggagaaataggaatgcttttacactgtcagtgggagtgtaaattagttcaaccattgtggaagacagtgtggtgattcctcaaggatctagaaccagaaataccatttcacccagcaatcccattactgggtatatacccaaagggttataaatcattctgctataaagaaacaggcacaagtctgtttactgcagcactgttcacaatagcaaagacttagaaccaacccaaatgcccatcagtgttagaccagataaagaaaatgtggcacatatataccatggaatagtatgcagccataaaaaagaatgagttcatgcccttttcaggctcatggatgaagctggaaaccatcacactcagcaaactaacacaggaacagaaaaccaaacactgcatgttgtcactcatatgtgggagttgaataatgagaacatatgggcacagagaggggaacttcacacaccagggcctgttgggggtggagggcaaggagacagatagcattaggagaaatccctaatgtagatgacgggttgatgggttgatggatgcagcaaaccaccatggcacatgtatacctatgtaacaaacctgcatgttctgcacatgtatcccagaacttaaagtataattaaaaaaaaaaaaaaacatttggctgagcgtggtggctcatgcctgtaatgccagcactttgggaagccaaggcaggtggatcacctgaggtcgggagtttgagaccagcctgaccaacatggagaaaaccctgtctctactcaaaatccaaaaattaggcgtggtggcgcatgcctgtaatccccactacttgggaggctgaggcgggagaatcgcttgaacctgggaggcagaggttgtggtgagccgagatcgcgccattgcactccagcctgggtagcaagagcgaaactctgtctcaaaaaaaaaaaaaaaaaacctcatgaataactttatattgaaaaatgttgtaataataacattttggctatatcatgtaaataaaatatattttgaaattaatgtaccctttttcttttcactttttaaaaaaatgtgactactagaaaatattcaattacatatatagtttcccttatatttctataagatggcatagacttccatgttgcctactacctctttttagctagagtctatattttttctgctgttattacattgtgttattttttaacacatgtatcagatgtttggcacatataaatctcatggtcagctaagaccttcaaattattctcatagacatgattatcaggtcatattgttccatcctgcatttggcctctctgaaactaactgctagactttgtatactaattaaatttgtgtattctctgcccttaagagtagttgggttgaagactctacatattttttcctctcaaatattattttaatgaatattattttaatgatctggaagtcctgaattttagttctatttctactgctattattcaaattcggagagacactgtttaatctgtgttttttaaaaaattgtaaaacattagattgccctttaataacatctaacttcaaaattccatttttctgataaatgaattcttatttctgtgatgtttgatagattatttccttaagaataaggggcctgaaatgaaagaaagatcgcaactttccttaggggataactattatcagcggtttcctggttggtaaaccagcttgtgggggtgggagatgatttgtaacatttgctaatttctgtagtgtagcttctcccaccatcttaaccaatttcaagcatcagctggcttgcaaaattctaggaaatttaaaaatcaactctctcaaatcaataagaactagctttagtacacccatttattttgagctgtatattttttccttgattctgcctgcccagtagcaaaagtcttgttcatccttcatgatgccaattgaacatgtttcttttttctcttcctactgcagccatcataattgagaaatgcatagcttccctctgctacaactatctccttgattattgcatgtaatcttcaaaatctttccttacatacctaactggcctcacgtctctgtttgctcagcaccagctatggttgtccttgcactcctccatgaatgtggctttgttcaatgtgtccctgtacccctatttcctgtctcataataaatccttcccatgattaccaggagttccgaagttacatgtccttcctaagttctctcttgaccctcttcctcccatgtaatttttcctttctcttcacatccatgaaaaatatccactatgattttcatttgggccttcatcatgtgccacctcataatttatgtcatattattttaacccttgtattgatacttaaacaattcatgatttggttaacttcctatgtttcttgcacactgtcctcagtctagggactgtttgccacacttctttgttcactctaaattaacttgtgcagtactatgtacaggggcaccttgcgcttccaactttacctatgttatctagccttgtcgctttggactactcacttcattttccagagcctcagtttccttatctctaagatagcaataatgatattttcttttcaaaatgattataagaatacttatgatatagggaaaataactttcataatgctggtacaataaacttatttgtggcattacccaatttattatagcaggtactcaggaagtatgtcttcatgaagtgtgtggagagtagaattatagtaaccagaggctgggaaggggtgggggccataaagagaggttggttagtgggaacaaagagacagttaaatagcaggagtgagttcttgtgtttgctaacatactagggtgatgatagttaacaacaatttattgtatatttcaaaatagctagaagagaatatttgaaatgtttccaacacgaagaaatgatgaatgtggcttggtgtggtggctcacacctgtaatcccatcactttgggaggccgaggcaggaggatcacgtggtcagggatttgagaccagcctggccaacatagtgaaaccccgtctctattaaaaatacaaaaattagccgggtatggtggcacacacctatagtcccagctgcttaggaggctgaggcaggagaatcgcttaaacccaggaggcggaggttgcagtgagcccagaccacgccattgcactccagcctgggtgacagagtgagactccatctcaaaacaaacaaacaaacaaacaaatgttgactatttgaggtcatggatatcctaaataccctgatttgatcactacacattgtatacatgtatcaaaatatcacatgttctccataaatatgtataattattatgtatcaataaaaatttaaatacataaatagaaatagcaaactaatataacaaaagtaaatttaggtttgttaatattttaatatggaccatagtctatcaacaatatgttatgtattcttttctctttataaattctttatagaacatcctgcaaatccagaccatacacaataagtatttgagtgactcgaatccactaaaagttgggtatattagaatctggggtgtgaatacctatgtgacacaagtcagtttcacctatgacaaccggcaatttatggagacaaatttcaagagtgaaccttataatcaggtaggtctgaaaggaatattagcatatcacaagtaaattttatcattctgcaaaattatcaccaataattttgctaacaattaaaattatcattgttaaattttcatgtattagatggttataaatacgtgcaatagatatgttcctgaaaagttgcaaatgttgaatcatattgtaaaatatgcaacattaatggtctttccagtatggcctaggggtcagtgatcactggcctgatgagatcctctccatgtatttaccaaagagactgtgctatgttttgataggttagtcttccacattagcaaaataaaacttatttctgctgcagaggctaaaacaaaggaaagggtgattccctaaagctgttgaaggttgcccccatgcttcctgcagttattcatgtccctggtcaaattgatggatcttataggtagacgaaaattggcagtaaactgtggtaatcttcgaatgaatacatcccacctgtggtataggataaaaggttgataaaacagggggacataaatagcaggccctactagaggattctagaatcaactaaaccagaattttggaagatgaaataccaatagttaccaaaggcaaccacaaagaaaaaagtatctcacttttagaacataagacaacataaatacggaaccagcaacccaaaagggatggtttagaaaagtgaaaatggataaccatagttcttgttttctaaaacgtgaaatgagtgccctgatggtatttggactttggaaaatggcccctctgagcactcaaatagatcttctccctctaggctcttctgggtatttaccttaaagcattttacctggactattgagttcaaaaccactctttgcaagtaattgcttctagttaagattgtgcagaaaatccttgaataccttctttttaaaaactctatggcatatctgatgcctattatgtgccagacaccatactgtttgaaatgaggaaaacatgaaaccaacctgctgtcaagaggactaaaacccaatggcaaagcaaagagattttaataaatgttggttttaatcacagctacaaatatttgtaaacaataaggttctgactaaatgaagtgaaaagaaaagatttccagcatagggattatgcacacagagcatctctctgtatttatctgaccaaaatcaacatgacctaacccaaaaaggaatgtttatatcctattactggaaaggaatgaatccatcattttttgttaaattgtaatttaagaggtgagctacatgtgaggtttaagaagttctaaaatacccatttatatctcttcttttctggcagatactaactattcaattgactgacaagactatcaacctggaaaagttaactgaggttacttggattgatggtggtcctgtacttcctactccaactaagacaagtaccatcccaatgagttctcatccttctccatctactaccaatgccaccagttctgagacaatcaccagttctgccagtgcaaatactaccactggcactactgatactgttcctatcacaaccacatctttcccaagtactactagtgttacaactaatactactgttcctgatacaacttctcctttccctacaagtactactaatgctagcactaatgctactgttcctatcacaaccacacctttcccaacaagtactattggtgttacaactaatgctactgttcccaatacaactgcccctttcccaacaaatgctagtactgctagcactaatgctactgttcctatcacaaccacatgttttgcaacaagtactattggtgttacaactaatgctactgttcccgatacaactgcccctttcccaacaaatactactactgctagcactaatgctactattcctatcacaaccacaccttttgcaacaagtactattagtgttacaactagtactactgttcctgatacaactgctcctttccctacaagtactactagtgctagcactaatgctacccctgttcctatcacaaccacactttttgcaacaagtactattggtgttacaactggtactactgttcctgatacaactgctcctttccctacaagtactactagtactagcactagtgctactgttcctattacaaccacaccttcccctacaaatactgctgatgctaacactagtaatactgttcctaataccactatgccttctcctacaagtagtactactgtgagtactattgctaccgttcccatttcagtgactccttctctgacaagtactgctgatgccaccattagtactactgtacttattgccactacttcttctctaacaggtactactgatgttagcactagtactactattaataatataagtactcctgttcaaacaaatactactaatgctagcactagtactaatgttgctaatataactgctacctctcatacaagtactgatgatactgttcctaataatactgttccagttacagctattccttctcttgcaaatactggtgttgacactactagcaacagtttttccattatgaccacttctttctctgaaagtactaatgctatgaacactactgttattatggcaactacttctcctacaagtactgatgttgctagcacaaataatgatgcttctatgacaaattttcttttagctacaatgtctgctggtaatataactagtaatagtatttccataacaactacttcttttggtaatagtgttccttttgtgactactccttctccaagtactgatgctactactacaagtaataatactaatcctggcatgactacttattaccagacttctcctaccattcctacccatactcttacttctattcctagctctattacttctattttgagcatgtttccaacaagtaatacattcactactgataaaattactaattttactacccctacaaatgcaaacaccattattttcaacactcttgatacaaaaagtaccatggtaatagatgctacggtcactactaccagcaccaaagataataccatgagtccagatacaacagttacttccatagacaaattcaccacacacatcacacagttcgctactccccattctgctactactacaacactggccttaagccacacctcattagctcctacaaatctttctaatctaggcaccatggatattactgatgcagataactccagcagtgttacaggtaacacgacacacatttctgtttcaaatctcacaacagcctcagtcacaataacagccactggtctagattcacaaactccccatatggtaataaattctgtggctacttatttacctattactgcaactagtgctaccacagatactacaaatattacaaaatatgctttaaatactaccactcctgatagtacagtacatacctctgctactgcacctacttatattgcaaatgccataaatgctactcaagttccatgattactactcaaggcaggatagttacctcagataacgcctacaaacaactattacagatatagaaaatcagttacgagacactctatctatcttatgctacttaagttttcacggatattagtactctagccataaaagacacagctactccaaacactctcgtcattgcagacatgtttaggaaggtttacaaaccttataggtttcaccaaagaagctgtgggtacttattttgcaaccatagtatgtgctcttattcttttaaattatagttattactcctataacctcatcagttaaactacagatgttttatatatcctatatatccttgctacagatttcacaggtaattttggtatctcagataacaccacattaggctctgtaaatactattgccttagatttagttactgaaatagcccaacttgtttcttgggtcacatgacgtaccataactgagagtactggtgatacccccagcactcaaatggtttctataccaacagttattgatattacaggagagtatgtaattagtaatgctaaaaaaatgcactttattatcctatggacttttccaaatgccatagctaccaatagagtcatttgcattacacatactaatagtattatttcttctgaggagatcctagctgtagctacagatatagaaaattctaccattgaagatcttgtataaccttacttcagccactgaaataatttaaattataaatattacatgtgggtttgactatcacagaaaataaaatgattatagatcctaaaaacataaattcctgaactttgcaaccattaattcataggtactactaatactcttactacagattttataagtacttccacttatagacagaagagcattctcagaaaattagaattaatctaaattatgagatagtcttaaagcctcactgttaccaccaatgactggctctgactctagtataaatcagaaattatccagacagaggtgagaatgtaaatatacagcatgaggaagacagcctccacattggaatcagagttcataatcttatttgcattttcttctattaatacaagcttttcccttataatttcactgttcagactccccttcattgtgttagggttttcagtctattcctggtttttcatatccaaattcatcatccatccttgatccattgttttcttagatcactcaaacccccatgagtagacccatggtcattaccaaatctggtcatttgggtactattgtaggtttaaccctagggcaatattctcgaagtttagttcagggatccatggggttccccaagactttctggagcacacagcttcttcaaatctactttcataatgatgctaagttatttgttttttcagtctcattgtctcattagtatatagtggcactgtccagatgctctatgctgtattgtgtcataaaagatgaatatagaaaaagaaaaaagaatctagctgtattctattaagctagacattaaacagatttacaaaatgtaaaataatgtcattcttctaatttttttttgctttgggaaatacagttatttttcattaaaaacatatttatgttatcacaaagtgaatatgttattttttatgaatgaaaaataaatatttaaaaaatattttacaaatgactcaattttgatttctaatgcagtaaatattagcagatataacccacataaataaagcacagtgccctcaccaattttgaatgtaaaggggttctgagactaaagagtttgagaacaacttcctttaagtgggcagaaacatcgtatttccactctcatgtcctggtcaagtatattatcaacttccccagcatgtaggtactccagcatctgtggcttactcaacatgaatatctttccactgtctacaaacacatctacccagctttttgatctgtcagcccagctgtactattgtccagacaatttgatggtactccagatgaggggcacagattcatcagtcagcaacatttgcttttggaatctgcccacaagctacagtcctctgaacaaagttgatagaccttattcttgtgtatacatgactcttgaccttcccaactcaaaacaaaactcaaaattctatgggcttggtcagactccctcacttgtatctttactgagggagacttagtgcatttgtcttcttggcatcacaaactctgatacaggacaaagtgctctgtgtgatagggcaccatgagattctgctgccaggccaccatacattgctcattcactgaccaacaacttcattaaagcagctgggatttggaaaactgaagatgaatctgcttgaacaagcatagttctgaagccaccaaagtccaacctcttaagtacgtaaatggaacataattgaaagcatggaattttgaaaaggtaagaaatactttgaatatacaaaagtcttgactttggtcagatgtttgaaaagacttgagaattgaaactcaggagtcaatgcacaagtagtggtcctggaaccaggttcagaaaacatgagggcaatgttgacatgctaattctaccattgacaacactagcaaaacctgtgcatggactctgatttataaggtctagagaaacttctaagctccataatgactggccccgctgggtcacccacatgtgtgatattaattctgcactaatgattataacttatgttctaagtataaagaaatttacttttctacacttctggtacttgacacattcctacctttaccattactgtggacatcattatttttacacctaaaatttctagttattaatttaaacttcagtttctagtattccaagcatcgctatgtaaacactattcatgttgactatttaagagatgtcacacatactgcatgattaattttccagtgaggaatatagatgacagatgttttggattaacaggaaactcactgggagtctaaaggtatttaggaatacttcaaggagtaagggaagctgggaggtaccctgtagcacaaaaaagagtcaagaaaagctttcaggtggggaatgcactggacaaagagactgactttacatggtgtgattaggagatataaaatagtccactcttttctacagcaggagcattgtgagaagagacaagatttaaagtttatcaagttccatcaccaaacttccgtgtatatgagattagacattcaaatgagggttgaaagagcattcataccagtaaaggaacttacagggctagagaatgctttggtttccacatccctttccccatgggagagtggagtggtgctctgtgtgaagggcactgcagaagaagtgctcgatggagattaagagtgcctgtgaggagctgggactggcatctcactcccagctgggcactcgctgaactgagaaactcttgcctctcttccccatcagatgatacagtggagcatggagcatgggcaaggtttcagaaacctcatcatgcatctcccagagtgtggaagccaatgaaatcacaaagaatggcgctagagtcttgcccagagaattccaaaagtggcagagattggagaccctgcagtagtggatgcagagccagggaagtagtggtgcatcctggactcaacagtgttcaatggacaaggaagctgaagctcctcaggtgggtgtggggagatggctgggctagggctgtcatgaagcaatctgtccagtggagaagggactctagtgatgagaggtcgtggatggacttccaagagtggaaactaagtttgtagtggggagaggtcaaaataggtcatgcagattgcatctcacctcatgttagatgctgcacaaggggcctctgaaaaactcactaatgtgcccatgggaagaaatcagcactggggtcctctcacactgagggtacctgcggatgccttgccatagcatccatcacatgggaacctttgtcttttcctttaatttccatctggctgtgaaggatacccagaaacagtcaaggaagaggagaaggagaatatggaagtgtaaaagcatagaccgtaatccccttcctcactgctggaggtggtctctgcggaaggagaaaacttgacatggatgtgaaaatgacataccgatttagatgatacaaattcttgaaaacttccaaatgaccagaaagtgatgaggtctgttgacgggataagaaaagaatttcaactcagcattgaggaagaggggctaagattaagaaaaaatgaaaagcttgagaatgctgaaaagacacacactgcctcatttcacattgctcttacctgttagaatgatgggtgaacattcatccttaactttgtaatgctttataaatctcttattccaaggaaaagtggagaatggcttggagtacaaaagttagatctgggccccaaaggacgtttgaggttttctcaccttagccaatctctggtggcttcagagaaggtggctttggaaattttttactatgtaattgagaaaagtttggctcaagagaagaagtaaaggggtctgtacaacctatgggtcttgttacttaaaaacaacttcttatatttgcacaataatccatagtttgcaaagggcctcacataaatgttttattttgttccactcctgctgtgaggcagagagggaagaaatctttacactttttttctcagaggcagaaaggaagacttagaaaggttaaatgacttcttcaagaacacagagtcttaaaacatagtagagcttggccttctgattcacttcctattacccgtctgcttcagggtcccatctcctgaggaaagtccatctttgccatgatgtgatgaactaaaataaaataaacaaaaacccacttctagaaccaaataagtcttgtaaaagagtcctgatattattcctatctatttacgtgacctggatcaacttgcttgaattatctgagccttatttaattccttcattggtaaaatggaaggattgagagagtgcctaggaaaatatctagtgtagcaagaacccataatttggtattctttttggcatatcaaaacatcttgtaaccttgaatatatacaattttcatttgtcaattatacctcaataaagctggaagaaaaaaaaagagctgactactctattccttactgctaatacaccaagatgatacgtctggcttcctaggtcctctctcccaaattcttccctttttgataataattttaaaatgaacaataaatagataagttgtggtgaggttgccaatgtgttagaaacattgagtggaacttacgaaaaggaaccccttatgaaagttgtaagattcaaaatggagtcacttgtgccaaaccctggcaaaatagagttggggaaggtcctgaagagagggctctcacacaatttgtctgataacaggaactatcacaggacatttttccaaactgcagctttttacatgagtcacgccaagacagctagctgcctacacaagaatacttgcctgacacactgtctcacaaacctaatccctgcaagggagctacagtaacttccaggttacaaatcccacctagcaactatagactgttgccaatcacaactcgccagctcttgtaagacactgctagtgccaatgaactttctttcaaaacgacttgcataaccttctctttccccaataaaactctaatgtttttctttgttctctggatatagcagaggccaccctgttgtgcctgtatcccaaattgcagttctgttttcacattttaattccaaataaaagttctgtgctttgggaacatctctacattttttcttggaagttgacaccctttaactctgcctttgctttccttcttaccctcttttgctgggtggaaatgtggagtcagacagtagcaatagtgagttggctctagatgcccacaacaccttggagggggagctggagagcagctctgcatgcagaaagtaggtgtgggcggagtagctctgtcatgtgcctccacacaggagtgaagcttgacatggaacatggtcaccatatgccatttgcgcctccctctaattcaatgacttctcaaaaaaaccaccattttaatatatttattattcatttttaaatttccttttacttaaattactaatgcattggcagtttttgtagatgaagattcttatttattgactgtctacaaaaataaaattgtaatctttcttaataagaggaaaacccaaatttttgagggtgagctatgcaaagagcctcttcagggtgcatgtgtttggacatagaggtcgcagtagagggagaattgacagaccttgtggtcctaaatcttcccctgggaggttaattgctccttagtggtcacttactgataaatggcacctccatatgctgacatcaggcagaagtggagtgctgatgcaggacaggcaagcccccaaattggggctcagccagacagggttcttggctttccccaggaaagaattcaagggcaagtaggtggtgctaaacagaaacttttactgaagtggcagtgcatagcagcagcagaggcagtgcttcctgtggaacagggctatgctgtaggcagtgcacccagagtagcagctcagaggcagttctgcagcctcattaatacctacttttaatcacatgtaaattaaggagcaggttattcagaaatttctagaaaaggggtggtaacttccaggtcattgtcatggaaagggttgtaacttctggctgttaccatggcaatgccatggcaatggtaaactgggaagaggtcgagtgacatggcattggtggatgtgtctcagggagagatgcttttgcctcttcactatttcagctagtcttcaaactggtctggagttcaagccttacctcagtgctgcttccaatactctgtccaatactgattgttatctttctcttattttagagtgcagttgagataaggtggaaccactgaatgttttaggaaagcatactagacaggaaacaagagtataagaattatgatcattttctctgtaaggtaaaatccatcctttcttcctgagttctcagagaaaggatgtctgagctatgtctgcctgtgaattagtccatttttctctttcttaggtcctaactttcttcttcctttccagagggcagtcccaacaagacgacaattagttatttgaataaaagggcagtttcttaaatctactaaagatttaatctactaaatttaatctactgaagaccctgtgctaaacattttaattctataggcatgtgaaatgacagaaaaacaaaactgttgttcagagagttaagcaactggtctgatactgtttatcaggttaagtgttggagaaacgattacaatgagatctgcctgcctgtaaatagcattataatttcaaacttcccctgaggaagaaccttggggttcctaaaagctgctttaggatgagggaaggtcaaactcttccttcccagttgtatcagaattgctttgttttttgtgttttctcttctgtatttttgcataagattttatttgaagaaagggcatcattgcttaaaaaaattgaggaaaaccaattctgaacaatgccatactttcgataatttctgctgtatgagttagacagtattttgtgggctagctcaggaacctaaccaacatgcattctaagtaggaagcatattacctataaatcagctatcagaacacaatctccatgtaatctaaatactttatgtcaggatacaaagatggccaaattgaagaaatccttaaagcaaatgttgggagatgaggagaagtgaatgaaagtctcttcctcatgatggcgggagatacctggttctcaggagagggaagactacagagcttgtctgggacttaggctgccttggcctctaggacttgccccatctgttgtgcaaaggatagactgaagaaacagctctactgtttttgaataacctctttactacgacctgttactctcctgtcatggcaacccagagaagcatgggatttttttttccattacatgatgttttccatttaatgggattataatatgaactatgcatttaaaggtagtattctccattttttccaagtctttgtttttttatttttattcatttatttaaaaatacaatttcaatttcattttagattcagggtgtgcatgtgcaggcttgttaccttcgtatatcatgtgatgctgaggtttggtgtatgactgatcccaccacacaagtagtgagcatagtacccaacagttttccaaatctcatccccctccttccctccccactctagcagtccccattgtttgttgttgccatctttaggcccatgaatagctaatgtttagctcccacttataagtgtgaacatgtggcatttgcttttctgttcctgcattaatttgtttagaattattgccaccagcttcatccatgctgctgcagaggacatgattacatcctttttatggcttagtattccacggtgtatatgtaccaattttctttataacaaggaatttttgaacttgtcatttgtggttgtgtagggaattaatcacattgtatggggaatgatgtcttaggcaaaagtcagcttgatagctatcatttacattattttgtggcattgtactaaatgtattacatgtgttatctaagtaaatatgctgaatacaagtccaggaatcttttcacttgattggacttggcttttacggaattttcccagacataagggaaaactttgtggcatagcatttaataatttctggctctgccatcagatgacaagggttcaaatctcacctctgctacttaggaacttgccatcttgtgataattatttaacttatataagcttcaatgtcctcatttataagatggaaataatgtagtatttctttatatttctagtagtactttttgttttttttgatacagagtttcgctctgtcacccaggctagagtgcagtggcaccatctcggctcactgtagcctctgtctccaaggttcaagcgcttctcctgcctcagcctcccgagtaactgggattacaggcatgcgccacacatccaactaatttttgtatttttagtagagatggggtttcaccaggttggacaggctggtctcgaactcctgacctcagatgatctgcctgcctcggcctcccaaagtgctgggattacaggcatgagccgccgcgcccggccagcagcttgctacttctgagtcctgagttcagctggctcagacgccagatcccaatacatatagcagactccattggacctgcactaagagcaccacctgtaggggctgttgcttcaggtggacactttttttcctttcttgcctcagttcccacatctggaggatgaggcaaacatctgaactacaataaagtacatggaaatgcattttcagtctgtaaaatgctgcacaaaggtttactattatttattattgttattctataattccctgagtgttctgatgtctattgcgggttgttttttaagttttgtttttgtttttgttttttttgtcttcctttttcttccccttggatcttctggaagcagagaagtttctctttagtgctggtgaaacaggagagttccctgattcccccctgcaggacatgtgacaagggtgtggcctgcttggtcgccctgcagctcagccccctgtagggggagcatgcagacaggcaggcgtggaggccagcatgagcgcttctgggctccggccccagggcagtgtctagggaccggtgtctgagactcccgaagcccaagtggacgtgtcttactaagctcttttagatattctgtctgcagatggcttgtgtgttaatcagcttagtggatcctctgccttatcccaagggcagtgggccagagtgacaaccttctgcatcccaagtccttgcccagtgtattggaagaatcagatcacatgtgggctcgaaggatgagtgcaagattttattgagtggtggaggtaaacgttttctctgtttcagtcagtcaacaaccgcatgtaattacttaattttaatacaaaactaggatcagagggtaggagctgcggtgtgaagagaactaagagccccttcaaatatatgggaatctaggttttctggagagctaggtactctgctaaaaagaaataaggaagaaataagaataagagatgaggaaggggggctgtgaccacaagagataaataagattatctctagccaatgactctcccatagtcagaggacgcctaaaagcagagttgaatgttgactctcagtctgctgaatacaaatccagggatcttttcacttgattggacttgatttttatggaattttcccaggcataagggaaaactctgtggcatagcatctcatgagatgaatggggagccagagaggggggatggagagggaaggtggtcttcccctgagttgggccacccatgggtgggagaaagactctcctccaaccgcccccagctgaactcccctagggatccagacctccttcttctctctttctctgcctcttgttctgtcattgctgttctgctggttccaacattcagcagcttgcttgcatgtgcccactaaggtctacggtttatatgggggcaggatggggggcatggcgggccaaaaggcaatttttagggtacaaaaacagaattgcctgtcctcacttagggccatgggtcttcagacttgagggtggggccttttccagggaaccaccctcttctacccagaatttccccctcctgtctgtatcactggtgctttataataaggctgctctgagtccttttttcaaattgaagttttgtgagggaaagctatctccagaggtgtctctagtgtgtctcaaactgtgattctgggtaaaattggctcttatttgagctggaagaaaatgtttcactgctaaattaaataatgctcatctttcctcactttataaaatagttaatggatacagttatcccaattttatgttatttttcaatgattttttttcttaaacctcttatgtttgctgctatttatttgttgccttgtagaagctctagctaagcacaaaatgtatgaacaaataacaggcgggaaagattttgaaacagtcagtagggtttctattgactgtattggtgtggttgaccattactttatatggcaaaactcacattttatacaagtaaaattttctttggtttgtgtgattaaattgaacatagtgtttcatcatgttctttttttttgagacagagtctcgctctgttgcccaggcaggagtgcagtggtgcaatctcagctcactgaaacctctgcctcccgggttcaagcaattctcctgcctcggcctcctgagtagctaggattacaggcatggctaatttttgtgtttttactagagacggggtttcaccatgttggtcaggctggtctcgaactcctgaccttgcaatccacctgccttggcctcccagagtgctgggattacaggcgagtaatcctgtatgattataccgccaccattcccggccatcatattcttctaagaacactgttatttgatggtgatccacagaataaatgtgaacattattgctgagagagactttggcttgtctcctgctctggcagtgagatgttgagttttacagtgtttttccaaagcagacttgtgtccagcctcagctgaggtgtacacaggatgctaattgtccctcaacttgtctgcacatcgttctacttatactcacttatgttttgtcaaaatatgatattaatattaaaatatttgttgaaataagttacaaacattttataatctatacaaataattcacatttgaagtagaatattattaagatataacatcttggtatttttcaatgtattctatttaacattcaatttttaatattcaaattattatcattcactactcaatctaaccccgtttataaagttgtataattttacaactgcagggaatattatggatgactttatacaactacttaattttactgctgtggaaagtgaggttcatagtgattaaatgattaagcaatttgcaaaagtattatggctttgtagtttattgatctttccaccacatggtccccagctctgtttaaaaatatttctgagaacttaaagaagtcagctcctcctctgcaccaggcactgacctgttgccaagagactcttgtccaagccaagtagtggtggccaagagagtcttgtccttggagaatatacattctattagggtaggctatcaataaataggtgaacaattgcataatgatgagatttcaggactctgctgccagtgtgaatgtgtgcatggacactggctacccacacctccccttcactttgccatggccaccagtgtgatcatgcacacagagggcagcaggccctgccacaggtgcaaatgcaagcacagacctcggcaaccctgtccccacctatgactcactgctggcatgagcatgtgcaggaatgtcacagccccgcttctgccagtatccccctgccccagccaacatgcatgcatcctgctgtgctgtgccacggctgccagcacaacccgtcggagtgttgtggccagtggaccaggaatacctcggccccctcagcacagtaggttcctagccttgaggggccagagaagaaagctggggtcctggaaccagctccccagggttagagcacacagctcaggagtgctaagctgagtcttgggacccaaaaatcttccagaaacaaccccagggaactgaacccaccttataccacagtcaaacccccaagggcatcaaagaaaataaaagcaagtaaacaaacaaaaaatcatccaaagtatagtgccttcaaagattgaagaaacatcagcccacacagtgagaaagaaccagtgcaagacgtctggcaactcaaaaagccagagtgtcttcttacctgcaaataactgcactagttcctcagtaatggtttttcgctaggctgaaatggctgaaatgtcagaaatagaattcagaatatgattaggaatgaagaacatcaatatccaggaggaagttgaaacccaatccaaggaatctaaggtatccaataaaacaatataggagataaaagacaaaatggccatgtaaagaaataaccaaactgatctgatagagctgaaaaactcgctttgagaattgcagaataccatcacaagtactaacagcagaactgaccaagctgaggaaagagtctcagagcttgaagaatggatctccaaaatagtcagaaaaaaaggaaaaacaataaagaagagtgaacaaatcctccaagaattatgggattatataaaatatgaaatctatgactcactggtgtccctggaagagaaggagaaaaagcaagcaacttggaaagcatattgagaatattgtccatgaaaatttccccaacctcactagacaggccaacattcaaattcaggaaatgcggagaacctctgtgagatattacacaagacaacaattcccaagacacataatcatcagattctccaacgtcgaaatggaagaaaaaatgttaaaggcagctacagagaagtgacaggtaatctaccaagggaaacccatcatgctaagagcagacatttcagcagaaactctacaaaccagaagatactgggggcctatagtcaagaactcttaaagaaaagaaattccaaccaaggatttcatatccagcaaaactaagctttgtatgcaagggagaaataagttccttttcagacaagcaaatgctaaggaaattacttaccaccagactgccttacaagaggtccttagggaagcgccaaatacagaaaggaaagaccattactggccaagaagaagacttaactatctaaagtatatatacactcaacattgaagcacccagattcataaaacaactacttgcttaatgatttattctttctatgaagcacatgatgatgccatcagctgtgaatcagagatgtagggaggtggttgttggaagcttgagaaagaaggtgaaacagccatcctggaaagcagaaacattaaaagacaagggacctacttacacaaggatcaaaagctgtgttgtaagacagtttgtcacaaacgcacgagtgctgtttcttctgcaacagtcagctacatgggtacaactgaaggaaaaaaaggtaggtagaaaatttggccagaattgagatattactatgcaaatatgacagaaagagagagggagttaataaaggtaagagtgtttgtaaggaagcagttatagttctggcccatggaatctggcctgggaaagaagggaagttagtacaataaaagactgagttcaagaaactgagaggctggtatgctggacagaaccactctgtgaatatcgatatttccaaaaagacacaggaggagtggtggaagaagagacagttgattgtagtcatcaagggatgaatggtgtgacttgcagaggacattggatgacagcagcaagcagctgtgttcttagtacaagcttttcaaaggagctcgggtttgagagaaggagagaaattggagaggggagcagggaggatgtcaatctacctccacttcttacaaagagatggtagaaactttcagagagtttgttgctttctaaaggtcttttattgtggaggggtttgagagaaggtgtgggatggggttagactggggctgtgcagagcagtgtgaggatgagggccttatgatggtgagttaccccagaggattatattgtggatggtgatttagtatatggggtagtgagcaagataggaatggtactctggttggagagtaagcagtgatttcccatggcttgagggttttctagatcacattaggcagaggaaaacctcagaaaaggtgatttcaatccagttgagggttgatttatttgaggaaaagatgcttaaagatctccaggggattactttcacccaatactagatgttttaccatgtgatcattacaagagtaatacaagctattctaatttcagattagactagacattatatttttctttctggcagattataatttatgattacaacaattcctgtgacctgtatgaagacacatatttctaatttcagcttgagagaaatttagtcttttattggatgatttaagtagatgattagtcagagggaaaattggtaatatagaggacagagtgtattataagatgcaacagaaacttttctccaatatatgcccagataaaagtacaccagagtaggaacagagtttagggcatatgtggtttaaaatttccacccataaaagagtttcgtccacaccacatctttccaatctcatcagcatgtgatttatacatcctcaaaaggttgcccattaaatttttgctcattacttattttaaaaacgtttttgtcggtactgagataaattctggcttcccagaggtctacctataagctttaatttttcatgttaaaccatctctctgatactgtttcgctttttagataatggctactattttcttaccagtcatccagattaaaactccttattcctctaaaacatctgtctcatgacatgtagctaaaaaagaatatatataatatatatatttatttgaattctaccatcttgtggttatttaagtagttgtctataaaatcctatatatgtattttgcagccttaagccatgcatgttattactcgttatgccagacagcttgacagctgaaattagtccaagggtccagggctctactatagcttggagatgggaagttctctgctcagagtgaaaattggtcaggaatgcttgcttgggaaaacgtgcaggtgttgtttagaaacaacatttttctaattttttttccaggttactctttctctcccttgtttccattttttctgatttccacatttttaatactgtttttatatagatcctgtgctggtttctttgctttaattaatatttcattttcaaataagctcaaacttggagaaaagttgcaagtatagtaacaaattccagtattctctttatccatttttcccagttatctcctgtaaattacaaattgttcactatatttactttatcacttttctctttttctctcctcctttcccccctctctatctcacaaacattcgacagtttgtatacaatgtgtttcgttatcacaaaaatactttagtatgtatttcctaaaaagacaagaacgtattctcacataactacaacatcatcatccaaaccaggaaattaacatgcatacactaccaccacacaatgcacagacaccaggcacatttcaccaattgcaccaataatgtccaatataggaagcacaaacaacagcaacacaaaagaaattagtctgcgagcacaattgcatgtcgcatttaattgtttcattgttttattttgcttgttttttactcccctctattctggaactattccttggtttctttttttctttcataattttgacatttgaagattactagtcagttatttgtagaatatccctcatacttgagggttacctaatatgtcctcgtgattgcactgaggttatgcatttttgagggaaataacacaggcacgatgttgagcccatctcagtgctccctatcaggagccacacaatgtccatctgtccattatcgctgatgttctgtggggttacttggttgaggtggtgtcttccaggtttctaaagctactattttgtctcaacataaataataaatatactgtgagaagatactttgaagttatgcagcatcccatttgttagttgtggcatccattgatgattcctgcctgaatcaattattactctcaaatttgctaaacagtgattttgtatctccttattccttttgcctttgttattttgcttgggaagaacttgtctttctttgctatttatttattgagtgatgtttggtaatagccacttcctgaggcctctaaacgtgccacttctctgagatcccacatattctcatgatctagcaactaaaattctaactacaggaaatcagggggcttccaggatttgtttccactgatgtccattttgactggtcagtgcctgtgctgtggcttaaatgtgtgatgttagaatgtgattcctgttccatccaggaagtagactggtgaagaacatttgaacttctaattcaggggtcctcagtcttaatagcatattggaaatgcctggagaattcaataacctacgaatgcctgggtggtagctcatcatcaggtgatactaatatgctgtcaagattgacagccactgggttagtgtagttgagagctttcctgttcattgtcagctaactaagtagtagcagggacttagatactgatggaaaccctagcaaacagggagaagaaactaaattattcgactcatgaaggtatggagagggagggaggaagagagaaagaggagaaggagaaggaggaggagaaataagagaaaaggaagagaaagagaaggagagagaaatggagccaaatgtaatcaatggttagatttgggtaaagaatatataagaattactgcccttctttatgaatttgaaattgtatcaaaatattcttaagccactaaagaccaaagtcacagtaaacattagcccatgggtcctcttgtcctcatagaaccacagagaaaagtaaaaataaggaatacatcttttatttatcctccacatttaatatgaagttgtgagtagaggaggtgaagaagaaaaagagttacattctcatagtcactaggagagaatctgacctcagaaacccctgaaggatgagagatgacagagaggcccaagtgacagagtgttcttagaggaagttggggtatctttcttttgcagcatgtaacgcagtcaggaaacttgcatccagaacatatgatctggagaggatcctgaagtcatcgaattcaagctcccaccgcctgtaggaatgtttaaagtactttcccagcggtattcatatgcactgtctgtctaatatgtatgtaatatgaatgcataccttttaactatagaagtgcattattctctgcaggttgacaaaaatgtagtccatttcttgaggcgactggaagaggaaacattaggtggcatggagtaaggctcagaaggggacagtgtgacctcaaggagagaatggctgctgaggggcttgtaggcatgtaactgcagctctgtaagggaagagaaatgcatgtctcatttcctatttatttcagtggcacctgtttttgacctgatgtcaagcacatagacggtgctcaatgaatatgttactgataactaaatgctgagaccagcaatagagagaaaaataaaggaggtagtgggtagggcttcctttcttcctcccccagtcctccccaaggtcccttccacacacacgaggtcctgtatttcaggatgactcactctgatgcctcctcccctagctcgtgggccacgtagataatgtcagggtaccccatgcagctggagatgttattttggggatagtagaagaggaagatgaggcacatctcattaatggtgctggggcctccctggaggaaacagacaaagatggagagacaaagatacaaaggcatgcagagacaggaggacaaagcaaacagaaaatagttgaagtggttatcttaccagtgatgccattctccttttcccttaaggtagagccagctcactgccctatttgctgctctattttcattggtggacaattattgatgttattccaaaaagcattccatatatctgccctgtcctcagcttcactgccactatcctgatttgggctagactatctgcctctcaactattgtcagtcactcatctgttctaattgcaatctgacctctgtagagctaccagacaagttgtttacaatttgtcttgcatcctgccatttgcctgttctgaaacctccagtggcttccagtcactggaatagtcagtcatcactaaaccaattatttgattctatctaataaattccaacccattcattcattccatttacttacctggcaaatatttatagagttagccctgctgtcctggagatataggtgggtcaggatcacccctgcttcaaggactgtttccaactttatctacctcatcctcattccattcctttagatatcttttgccaaccaaacttcttcatgtgcaccccacgctctccttatatatggctttctcagttttttccttctccagaattccccatctctatgtgtctaaagaaggactcattcacctacgtcacatgttcagttcactgtagtaggatctcatgattctttcctgtgaatttccctagtgggttattcccgttcttcttgtatggtatatatcacttactaacttgtgatataatcatttgtagggcggtattttttcctcagttgcctgcaacaccttttgaatcccacaagcactgaaccactcctgatgcacaaaacgggggattttcttgtgatcatagaaacaatagccaactttaattgagaatctactacaagtcaggcaatgatctaggtgttttgcatgtgttaaccaactcccacaacaatcttgtgaggtagaaagtagtattaatcttatgtgaattgggaaactgagatacaaaaaagtcaaataacttgtctaaagttagaaatgtactaaatgattgtgctgatattcaaacccaggcaatgaggccccagaatctctgctcttagtcgctatagcatactatatttccatggtcttggtgggttattggcagataatgtgagaaatccctgttcctatcttagatgcatggggtgtgagaacatgaaaagccccgtgtggatgtgtgatgccattggaggaaggaaggggcttcagtgaaatcacaggggtcactgggtagccaaagccatgagtgggctctccactggggctatggtcatggtgaccatggtggggtgagaggtcacttacaaatgtcatggagtcacggtccagtgtctggtagtgacattctaccagcaattcatctccctgttcagagtgaaacatgaaggctgagagtaagacacagagggactggtacagcttgagaactttcttggttgtcagtaatgaggtatgatgctgctgcccccaactctgcctggcctccctcagactctcaccggcttgatctccactctagagggcaaatctcgagtctcctgcaggttgaagtcataggaatcgtctttacagatttttcgaagttgtgttccattcctagaggaagagaagtcgggaattcagaaataaagagaagatgaaatacagaggggtctgccaataaagatgtagcatgcgggtggggtcattctgtgagtagattatccataaaaataaacaaaacacttcatcttccacagtcttatttcagttatttctactctaaagatagttctacctcttcctttttctcaaccggacataatcgtatgctacagaataaatcactattcttaaaattcattcccacctgcagaagggagagcttcaaggtcttccctcacctgtattgcactgcttgcagagcccgtccagccaagtgggtgtgcagcaggtagccatacacctgtatgtcaggcataggagctccattcatctgtaacagggaagaggtgcacccgatttgttaaggactgtgttcttgacctgctgcttgattttccccccttggtatttgacactttcctctgatgactgacatttaccactgtaattcttattgaacctttctgacccttcttccttctgcacttcccttgttctcaaagccctgactccttcccttccttgcaaaagtcatgttagtgaatctcctgagtaccaggctgtaattattctccaagtctggggttcaggctgtgtgggcttgtggatctgaccagatctgggatgggggacaaggagagtgtgtttcctcctcaggaagggtgcgcctcccagctccacctcctcaaacttctccgtcctacacagcccataggacatgaaggactcagcgcccggggggatgaagtggatgggaaacgtgaagaagcccagctggaggacatccgtgtcgtatttgcacagctgagaagtgtagtacacgcgaatccccgaggaatcatacacacctggtgcagagaggaacagtcaatcacaggaggcaggagagtgggtcacaatgtggagagaaagaggctcaggaaagctggggtggggctttgaccacagggagtcagcacacatcccacaatgcgttcccaataccgaaaaaaacagccagccccaccagcttcccttccttaaatcctctggatgctcaccaggaaggttgttaaaattgctgtaatgaatctccagtcagatccactgagggtccaagggggtcccaatagagacgcctacgtcatctggaaactggtagctctgttggaaggagttagatttggcagcaagaagggctgggaaccagccatagggattcagggctcctggccttgttttctaattgtcatcccagacttcccctatcccctggtcttccaccagcccagtgatctcattacccaaccacatgcacccgcttagccatgtgtttaccccatcacgggactcactgtgcccccgacagccgagcccacgatgacctgtgagcaaagggagaaggcagggtcggccccatagcagtcgctgatgcctgtggggagaacgctagcattgccacaggcgtacaccaggatgtgatgcaccgttgtctcattgtggtagaccaacttaggctcaaactgggcagaaaaggagagcagagcatgatcaagaccttctacatcaaatccatattatcttccttcctgtcaaaactatacccatttccgtcttctctctgtttctctctctccctttttctctgtttttgttccccaagctaccattttcccacccagtcagtttgactctcctctcaactcccccctcctttaagccccttctggagagcagacatgaaatctagccagggacattctgccttcccttagtaacctcctcagttcactgtatctgagcatgtagccatgccttttcaaattatctgtctaaagaaaaaaagtctccacatttgccacatattgtgagatcatacctttatttatttgatcaaaattgaaatcactcaaatatgaaattgggttaccaagtttgagttcattctagctagacttctccaacctcctgacagcccctggccatatcctctccctgcctttacctcctcttgggctaagagagcacaattctggggccaggttgaggctcatactttgttctttgcaaacaattattaattcttaaccttcatcaacatgtctgttgcattgtggggcttaaataaaatagcgctgggagttacatttctgggctcaggaaatgatgtagctgcgacctctaccaagccctgcctgtccccctgttcttgcaactacttccttcttgcttcctccaagaaattttccagacctcatcctccagggttgaccacaccccctgctctgctccagcacccttccctgccttgacaatgtcccccatctggtccaccataccttgtaaatgtgatgcttctcgctcacaatagggagaggaagaaaggtgcaggcatacgtggtgtcatcctctggaatgaggaactgtggaagggtgcacagaagctgagccagatgacagtgaggctctgaaaaagtagggcaagggccaggccagggaagggggttcacattagggtcagattggcagtccttaggagacagagaagagtcagagtaatctccacccaagggatatactgaatactgggggcaagagaagggatctgggttgagtggggtgaggagaagggagctggaggctgctgggtgggatgaaggtgtcttacattagtgatctccaagtcatggatgatggtgtcctcagggacatccagatcgtcagggtggacgacttgtagcagaaagatggacttgacaaaagtacgctcccgatacagcttcagagtgtcatccaggccataggcggccagcaccctcacggtgttgctctgcggggtgccataagcattgaggagctgccacccctgagcagcactctgcatatccctgcacccaaggacctacacaaggcacttgctcatgtctacatggtggaatggaaggaacttcacactgggagtgagaactagttaagttctatttctgcctccgaggctcacttgctggtgatcttgagcaagtcacactccctctcgcatgccctctctaagcttgtgtccacatctgtaaaatgaaaggactgaattaaactcttatatcctaacactctaaaggtcagcgaaactgggcagaattcttcaaaaggagaaccctggggcaggtgggcaggaggtgaatcagtgggaggtcaccctgcggaaggcttgtggatttcagcaggtggcacaattggagcatttcctgggaaggctgagaggaatagaagtcctgggaatgatgactagctgcctgactgggggcaactacctctccagaaggaaaacctgcttgtgaattaaatgcttttctctgctctctattttaccgtaatatccaggtcatgagggtcgcaggagcggaagggcctggaaaagtgcatggtggtgtagacagcatcttccgtcaggcccagcagctcagcatcctggctcccatcctccttcagagtgtcttcctccaccaagtgctgatccttgggtccagtgaaggtcaagaagtaagaactaggagcttcaaatgtcatgctttggagcagtagctgttcctttagctcccctaggatactagagtagcagagcccaggtgttctttattatgtagtttttctccttgggcaaagcatggcatgaagaacatggcagagcacacttttatggataatggagtttcaccacctgtccttgctttacttctcccatttcaaatctcatgtccataaagtctaatattcctgcatccctaatacttgaagtctcacatattatctgaagtatgtatgacattcattctctcatgtggctcttcatgtaactatttctcagacagctttgaattttccccagtgacctgcagttagtgggctttagcaagtaagtggtgcaagactatctcacaatctaatggtttcattctctcagcagtctttagagacttgcagtctggaagacatagatttcaaactctacaatggaccatttctggagggacacaccagcattcagctggcattctgggagtgtgtttagatatcctcggggaatgtgaatcctttctggacagaaaccatcctcaacccaacaaagaccctcatccttggaagcaagtcaccctcacacttaccgagaaatagacattgccattaggcaagactcctccaacaaccagatcacttcccacgttggtgtagcgatttgtgacaccgaagcccacccagccagctgtacggacctggagctcaaaactgatgatttcagcctcaaggtcaaagtcccaacgcaggaaaatgacattagaaggatctaggaacctggaatagcgcaggcgagatgtggggccaaggcggttgctttgtaaggggactcccagggccaaaagtggaaaaagcctgaagagaaggtcatgggccatggctcctgggacctggagcatctcccttgcagatgaacattcgagagcttcagagttttatgtcctacctgggccaggcaccatgccatgggggagggccaggctggggcacttctgatctgattatcctccgggttcagagcgatgccccttacataactctggaggtgagagatgcccagagaggatacagggcaggttgctttcactctgaagcaggggcctggcagaaaattcttaggattgaatcatttagactttccaccctgaccccatgccagcgtcctgccagtggggaccctgcagaatcaagaaagtttagtttctttttctccccctcccttcctgcccacctcttccatcttctatcctgggatgtctttacaggacattctgcctctggactatgcccccaccccactttttgtgggcatttcccattttgtctatgtatagaacttcggtactagcaaggatgtgggactgcttgtaaacctagtctttcaatttcccagtgcagtgcaggaaggagggaagtagctggcaaggaccggagggaaggctgcaatttccatctgctagaggaggctttgctactaatccctagaaggacactgagaggagggatatcagcttctcagatggttgagtcgggcagctttggttttctgcacactcctggggaggagcaggaagagggaggaggtgaggggaagaagatgagaaataaacatgagtttgcctttgggatgctttgtgctttcccttccggccatcaattacctttcagagaaattaacttaatggctgcatggcaggctgagcttgcccgattgagcacattagtattatgcaaacaatggaagcaacacagaaggaaggttagaatattagaacaccagaatagaaaagaactttagagccacttagttttccaaaaatttctatctccttaatttctagatgatgaaatgggagctccaaagggtaacaagagtggtgcttgatgccccgttgagtcaatggtgggtcatggtccctgaccataatttccttaggtcacagacaccctacaggtaccagacccctgccatgcatttccacatggcttgtcctggtggaagaatctagtgacatttgttggctgtttcttagggaagaaaccaaagtctgactctaactccacagtattttccccctggtgactgacacagctgacctagagctagaagtcaactcatctgacccctggttgctggctctccatttgacaatggagaggacatggaccctgagggcctctcccacacagactgggcctcacctctccacagaggaattcagctcaggagtagatgtacagatgccggcacgatctgcttacagcttctcattgcaggcatagtctttttttttttttttttttttggctactgagctcatcaaagctggtgaggacccagctaaggttgtttgctgctgctgtgagctcttgagtagtaattggggtgtggtgagggagaaaacaaatgcctcaagggggcagccacagcccctaactctaggcctgacagagaaggcagggagctcggcagccatctggaagcaagaggcttatcttggcccaggaccagagctgagccaagagaagaggagaggtcggagcctgggaggcactgaccttgaggagcagtaacaccagagagagagagagataacaggtgcgtggagacattctgatcccaatctcacttaaggattaagggagggggcagtagggagacaggatagccagtcttgtaaattgagacaggcccaggatcccttatcctgcaatctgtcctgctggacagagcactgtcctcagcacagaggcaaggtcctcaataaagagctgggagcagtgactgcagactcagagggtctcttctcctggatccttatctggcttccaccccaggaagccaggccattgctacacctgtgtggggctctctagggagatggggctggggctggccctgcttcccttctgcatttatcaagtgcctgtgacagggaagacaccacaagagggtcaccgacccgagggcagtgcagtcccaggtcttgaaatagtgaagttcagtttctaaacccctctgtgcctccttctcgctctctgtaaaatgctgcggttggagagatggtggatacagggccttttaagttgaatttcccagatgattggtttccaagctttctgaaaaatgaggccccttatcaatgttgaaaaataggtaaatctcattcttttttatgactgaacttaaagaatgtgattggattgtttgtaacccaaagtataaaggcttttttttttttttctgagacaaggtctcagtctgtcacctaggctggattgcagtggcataatcacagctcactgcagccttgacctcccaggctcaggcgaccttcctgcctcagcctcctgaatagctgggattataggtgtgcatcactatgcctagttaatttttgtattttttgtagagacggggcttcatcatgttgcccaaatgcttgatgtgcttatttcacattccatgcctgtatcaaaacatctcatgtaccccatacatgtatatacctactatgtacgcataaaaatttttttaaataatttttaaaattaaaaaaattctgagaatttaagcttttaatctcagttgagtactaagtgaatggtaattaaagactaaaattactaccagttgtcatattttaattgaatttaaaatttaccattgcaatcatagaagtcaactcttattgaaagcttagtctgtgccaagctctattctaaaatgtattgaccctaaatacatttagataatgtatacattatctaaaatgtaataaaaaaataataatttttgttattatttccatcctatggatgaagctgctgaaacccaaggtcccactactgggtggtggcaacactatgagctgttgggaaaatataactaaatctattattaagtttaagtaaaataattgaatattatataattatatgaattaatcaaatataattaaatatatttcataaataaatattattagaaataattcaaggagaaaaaaaatcccccaacccagaaaacctctctacaaaggtagatgagaacaaaagtacttttaaaatctttttttttttttttttttgagatggagtcttacttgttgcccaggctggagtgcagtggtgtgatctcaactcactgcaacgtccacctcccgggttcaaacgattctcctctctcagcctcccgagtagctgggattacaattgcccaccatcacgcgtggctaatttttgtacttttagtagagatggggttttaccatattgatcaggctgttctcaaactccttaccttaggtgatccactcacatcggcctcccaaagtgctgggattacaggcgtgagccaccgcacctggcctcattttttttttttttctaacaaagagcatcctgaaatattgagctgcaaacataggtaagaaagctggaaacttgcatggggagatgcctgcagctacaccaaaagaaaaggtgtacctgggggccaggcatgtccaccatagaagcttcatcttcccttttttgttagcacatgtacagtaagaaagaaatgggcaacatggtgcagctcaggccagagggagtagctatttgtcctcactcaaaataacatattctgaatttggattttctttcccctgtcaccgttactgtcctagcatcacattccttggattctctgaatgccttattgcattccacacaaaaatgatgtattctccaacaaaggaggtcacctcacagtgctattggagtcttatggatagtgctaatgcttatggaatccagtggccttgccatgtttcaccacctaggatcagctggccttatacaatatcactacgacctattgaaatcttaggaccagctcaagttgggagacatctttagaggctaaggtgctcctctgaaaaatggtctccaaaccattttcctctccaaactaaaatttcagttaataaaatatgtgcaaatgaagctgtcacagttgcacttaataattcgcactcccaatttagcttctcaatactgcaagctaggcgttactgatttaggggttttagagccctggatagatgaagttttcctactagaacttctgcttcctgagggggttctcttcttccctagctgggctgaaagactccagtagtccacttgtagcagccacaggctgaactctctaaaatctgttcttgtttttgtttttttaaatactcagtcaactggccaaaaaaacacctctccacttaaaactatcaattaaaactctcagggggtaacagactgcagggtgaagtgaagagagaaggaaggaagagaggaaaatactatagagtgagaaagtggagttcctgggcaactagctttatataaaaggcaagtatgtactaggaaaatctgtcattgatttcccgtttatctgctgtgccataaacctcagttaacttttatagtaactcctcatgtctccagtaaacactcagaatcctgcaacatgaatgaccagaatccatcgatggcattgagagttgcatgggcaaggagaagctaagtgtaacacctccctctcacctttgccctcccctcccctctcacctttgcccttctatatagatccctctttattagacttccttttttcaatcagcatagtaatgtgccaaaatcacacattgtctaatttggtgcatgtagtaaagggttttgtaccccaaatggctgtggagtggcctttattttatgtcagttaccaattcgttagagagaacataattcccacttcataaacttcaattatctgaggaattttgggttttccatccttatctagacggcaagaagggttgttatgaataatcacagtgaagatatgtacaagtaaaactgctcaagcacccactctgtttagcagaattgagacaggtatgcatggggcaatgtgaggagttaatttatatttaattctaaaggtgaacgatggggacaagctgtgtcatatggtccacaactgccacagctcagttattttggattacattttcaatccagggtatatagtaaaaaattttggcatagatgccaacatcggctctcaaaacacatccatccgcaaaagacaggattccttgaagcatcccattgcagattgccggggcagcagaaacttcctgccaggaaaacaataataacaacaacaaaaaagcagattatctttctggcaagacagaaggaagaaaatgggaaaattaatggatgaagagtattttaccttgcagggctgcctccttcctggcacaatgcccacacacagcatattttccgtgatgttgtaggttttataggcatcgcgacactgaggcttggagattacagagatgttcacagtttgcagtgaatcgggctctttgtctaaagaaaagatagaagtcaaacttccttaagagttttgttaggtattaaaacttcttttaaaaaacttttcttcttctaccatcagaaattaaaagagatcaaacattcagagaagtcagaactgtggcagttaggacaacgagggtataggagatgatcagattaacaatttcttatgatgcagaatcggtgaccttataaaagtgatcaaattcttgggagttacatgtacatgtgagacactccaggaatgaaatgaaacactttgttttaaacttttctggaaatttggctgggcacagtgctcacgcctgtaatcccagcactttggtaggccaggatgggtggatcacctgaggtcaggagttcgagaccagcttggccaacatggtgaaaccctgtctctactaaaaatagaaaaattagctgggcgtggtgatgagtgcctgtaatgccagctacttgggaggcaggagaattgcttgaactcaagaagcggaggttgctatgagccgagactgcgccactgcactccagcctgggtgacaagagtgagactccatctcaaaaaaacccaaaaacttttctggaaatttaaacattcaaagggtttcttttgagatgtaatttttagagtttgaatgaatttacagatatctggcctactttctcaattgtcaggtcaaaacaaaaccgagtatctgcacaaaaaagtcactgaaaaagcagttttcttaaacatataaagctagtaaatggtaaagctaagatttaaaactggatttcctggttcctaattaaagttcttttctttgtatcaatagtccacaaatactgtgaattgtgcacacttgtaacaaaatttgtccaatctgaaacaaaatgagaaaaacaacaaagtagtatgaacacatgtggcatgtgttctttccacggacgtttctttgggaagaagtactgtattttaagattttggtttttttaataatggaagagtatgtttaatgtttttatttgaaaataatgtattagttcttgaaaataaaatgtataagatccttcactttattttccaagcaataatttcatggctaaacatttcttttgggaatacttctgtaggaaatgcttacttaactacttgatgacccagatcaaaataagatgcattttttttgaagtcatatctcgttttgaaccttatgccataacccagatgaatcaaacatactgctcacagaaggacatttggctctttccaaaaatcaaattgactctcagaggacaaataatttctacttattgatatattcaagaaaatgtgctctaaatctgaaggtatttactaaggattagttttaaaaggcttgaatcatggcaacaatgatagaataagtgtacatctgcccattggtttctataaaaagaaagtagtgatggatagatgaatgtaatctgacaagtttgtttcaaataaatctccttttcatactatggtatctagtgtatgatgtatattatatatactcaaacttactcatgagtaaagttgcattaataattcttcacaagggattatatatcattgttctattttgctaataggtaatcaactccctttcaccactactctcaactctcgtaattagcaactatagacagttaattagggtttgcatagaaatttggagatggagtaatgggcagatggagatgcaacttagaaaacagaaagttgccttaagttgtgggtgttttatggaatatgaaacatgaggcctagaacaaagtttagatagactatctagttcaggagtttcaaattatgtatagaaaacttccattgataaaaataatggtagccctttgtcaattttctgaagaaatgagtgaatgcttagaatgttaccagtttaaaatgtttatttcagaagttctttttaaaactttaactctgtatctttattaaaatcttacataaggaagttctatcgcatttagtaaaatattatatatttatcttacatttaatacactgatatttatttcatgacttttcaaagcttcaagttgctttattgcctgaaatggtttgaaaatatacaacagagtaatctgctttattttagagttaaggaaattgaggctccaaggtaaaatgacctgctgtcacatagaaaattaggattggaatacaaatgttttctttccactaaaaccacttctatcatatatgaaagagaaaatgatagaaagatacagcgggtgaataaaaaaaacccaaaaaccttgaagcactccttcagtgaggtacagagaaaaggaaaggggggaaagaggttagaagaaagcttcactaggccgaattgaagaagccaagagtcgcgaaggtgtagaagcatgtctaattctgagagaagaacattgtcttgaactcacagatatcacacacattgtagctccaggtagagacagagcacatggtattttcagagatagtttggtagggcaggttggctaatttcacatagtcattgagttcagcctctgttttcagcttgattagcatgatgtcatgatcaatagaagtgactgagaagtgtggatgatgaatcatcttctcatagccaatcacttgcagatgcttttcattagagtctgctgggattgtaacccccaatatcacccgaagctttctggaacaatatagacgtttatgagaggacttaacagagatggcttctccatcattatgagcctctattatccctccccacagacctttttctgtaccctcgtatgtctcccaaaggcctttctaatcccatttaattgggagatggtctcagacaggggtgagagtctgtgcccaacctgagaacccaaagaatggagtgcctttgaaggcttatcactcacggtaaattgcagtgtgcagctgtgatcacccaaagcgggtggatcaggactccagcgcagggcaagtagtcagatttcaaatagaccaagtaagggggagtggagctgactgtgtaatctggattaaaggccaaagcaactggaaagagaagcatagacaagaaattccaagatttctcagtcatcaccagaaaaacttcaggaaagtcatttaataggctccaagttcccctatccttttctctagcaactttatctgtaaaatgacttactttgttctaaaacacgaagaaaagacaaatggtagaaacatatctcttttgaaaaataaaaagtgtttggctttttcactgtcaataaaatctttcaaattaaatgttcaactttcttaaataccttccacaatttagtgggttgtatgctaaatcaacgaatttttttcactatttttaccaattttagaatgcttcaataagtcttaaggcattcttatttagaatgctttaataagtcttatctctttttcccaacaacaactcaagacagaattatataagtatcatgacaagaacagaccaaatgctaagagtctgaggaggggaaaaataatgtattgttttaccaaatatacattgagcacctagtatatgtcaagctctgttttaggggcttgggctatatagtgaacaaagtagatattcctgctctcatatattacaattaatgaagatattcagtaataataaacacaacacacaaataaactatgtaggatgttaaatggtgattagtgctatggaaaaacacacaagtaaactatatatgatgttaaatggtgattagtgctatggaaataaaagtaggacagggaaagagagaaaggtattaccaattgtgtgttgcgggagaaggaggggtttcaggcagtatttgtttgttgtttgtttgagacaggatctcactctgttgctcagattggagtgcagtggcaagatcaggctcactgcagcctcaacctcctgggctcaagcaaaccctcctgagtagcttggactacaggtgtgtgccaccatatctggttaatttttaaattttttaattttttaaatagagatggagtcttgatatgttgcccaggctggtctcaaactcttgggctcaagtgatcctcccacctcagcttcccaaagtgctgggattataggcatgagccattactccagtctcaggtaatattaaaccagtcatcagagtataacttcatgggcaatgttgaacaataacatgaaaacgggggaagttgctagtcaaatatctgggtgaagggactccaggcagaggcaacagctgcagcatgggtcctgaggcttgtgtcagttacatcacagaggccatggctgctgacccagagtgaatgaaggggagcagaggaggaaaggggctcaaagaagaatggagggttttgtagaccatcgtaagaactcggccttgtttcctgagtacaaatggaaccactcaaggatttgtgcaaaggagtgatgacagtctcctcatggagaacctgtagagtgtagaagtatagaggtagaggggtctgttaggagaataatttgctaatccaggcaagaggtggtggcttagatcattgtgagcagtggagatggtgagatgtgattgaatttaggatacatttagaagataaagccaacatttttctaagagatcaaacgtggggtatgagagaaagagaggatttatgaataagcctgggtttatgcctgagtaactggaactgtgccaggagatatctgattcttcaatgttctgctgtgccctctgtggtgcagaacatcaatcctgttgcagacaggtccagagtcaggtcttaggagtgggtctggtatttgagtgacaatgtccacgcctcccacaaaagcacacaagcaaacctcctgcggcaggcaggcaggcactatcacaggaggaaacttgatgggaacggggcagtggagagggacagaggaccatcctacacttgaattctggaatgatgcctctcgctgttacccgtctttcatgcttttcccaggatttctctttggtgggtaaagagacaaatatgcacacactcaccagtcagattcaagagggcccagaggaggataaacttcatgatgatgttgaaagcccagtttagctccagtctctggaaaactgggaagagagagagaaaacaactaaataaaacaaagcaagattgtagaattggaaaaatatatcatctgaattattttagtagcaggattcagttttagaaatggtgtccattattcagaggagagtgtagcgtcatctgtcagagagacaagaatagagtcaagtgattggtccccaatacagttgaaaatggttctggaactcagagttctgccctctgtcttcagggaagaaagtaccaaagctaagttgaagttcatgatatctctacagacgcctcctgtctggtctcctttttgccagccttggtaggcaggttcccctctaaactatgtgtgggctgctgcccctcctgtctgtgtgatgctatcccccactgtgtgatgctatttttctccagtggacataatgtagccctctggagctgacattgcttcctctgcctgacattaaactcctctttgaaatacattaaccttttccttcatgtcactgtttatccatttattctgtgaaccaacctgctaattatttatcttatgtatctaacttgtgctaggatctgtgcttgctgttggggttgcctcaactgaaggatttctttcctaccttccaagagcttacagactagtgggaatgatacttaagttgatggttatgaaacaaagtattcagggctaaaaattgagatatgccacagactagataaaaatatttgcaaaacacatatctgctaaataattcatgtataaggaaatagtaaaattcgacattaagaaaacaaacaacacaacctaaaagtgggccaaagatccttaccaaatgttttagtctgcttggactgccataaaaaaaaccacagtctaggtgtcttacacgacagacacttactttcttatagttctgaaggtcagaagtccatgatcaaggtgttgtcaaattcagtttctggtgaggcctctctccctggcttgtggatgatcaccttcttactgcttcctcacatggcctttcctctgtgcacacagagataaagagggaaagaaagctctctggtgactctttttataaggacataaatcctattggatcagggctccacccttctaacctaatttagccttaattgcttccttttaggccctatcttcaatacagttgcattgaggtttaggccttcaaacagatatattttgcagtgatggggaagataacaccagagaatatatacagatggtaaatggcatatgaaaaaattcttaacataatatgtcattagggaattacaacaacaatgggataccactacataccctgtggaagggctaaaattcaaacactgacaacaacagatgctagtgaggatatgaagtatcaagaactgatgctggtgagaatttattgctgatgagagtgcaaaatggtacagtcactttagaaaatagcttggaagtttcttattaagctcaacataaccttactatatgatacagcaattacacttcttgatacaccaaaagatttgaaaacttgtgttcacaaaaatcctacacataaatgtttatagcagctttgttcaaagttgccaaatcttggaagcaaccaacatgtccttcaatagataaatggataaacaaagtgtgattcatccatataatgaaatgttattcagagattttatgatttaaaaaacttaactctcaagccatgaaaagacatggagtaaacctatatgcatattgctaagtgaaaagagctagtctgaaaagattatataccatataattccaattatatgacattctgggaaaggcaaagctatggagacatatgtatgtgcaagaacttttttcctataatgacttcttttcctccggatagattccaaggagtgggattgctggatcaaatggtagatctactttcagttctctaaggaatctccacactgttttctatagtggttgtactagtttacaatcccaccaacagtgtaaaagtgttcccttttcaccacatccattccaacatctatttttttttttgattatggccattcttgcaggagtaaggtggtatcacattgtggttttgatttttttttcatatgttttttggccagttgtaagtatttttttaagaattatctattcatgtccttagcccactttttgatgggattgtttttttttttcttgctgatttgtttgagtaccttgtagattctgaatgttagcgctttggcagctatacagattgcaaagattttctcagggttgtctgtttactctgcagattatttcttttgttgtgcagaagatttctcatttaattaagtaccatctatttatctttttgttgcatttgcttttgggttcttggtcataaagtcttcgtctaagccaatgtctagaagggtttttcctatgtaatcttctagaaattacatggattcaggtctcagatttaagtctttggtctatcttgagttgatttttgtgtagagtgagagatgaaaccagtttcattcttctacatgtggtttaccaattatcgcagcaccattgttgaattggctgtcctttccccactttatgtttttgtttactttgtcgaagatcagttgattataagtatttggctttatttctggattctctattctgttccattgggctatgtgcctatttttataccaggaccattctgttttggtgactatggccttgtagtatagtttgaagtcaggtaatgtgatacctccagatttgttctttttgcttagtcttcctttggctatgtggactcttttttggttccacatgaattttaggattatttttctagttctgtgaagaatgatggtggtattttggtgggaattgaattgaatttgtagattgcttttagcagtatgatcattttcacaatatttattctacccatccatgggcacggaatgtgttttcatttgtttgtgtcttctatgatttctcagcagtgttttgtagttttctctgtagaggtatttcacctccttgattaactatattcctttttttgtgtggttattgtaaaagggattgagctcttgatttgattctcagcttggttgctgttggtgcatagcagtgctacttatttgtgtacattagttttgtgtcctgaaactttgctgaattcatattccagttctaggagctttttggatgagtctttagggttttataggtatacgatcatgtcatcagcaagcaatgagagtttgaccttctcattactaatttgggtgccatttatttctttctcttgtctgattgctctggctaggactttcagtactatgttgaatagaagtgatcaaagtgggcatccttgtcttgttccagttcttagaaggaatgctttcaagttttccccattcagtataatgttggatgtgggtttgttatagatggcttttattaccttaggatatgtcccttctatgccacattttgccgattttgctaagggtgttaatcataaagagatgttggattttttcaaatgctttttctgcatctactgagataatcatatgatttttgttttaattctttttatatagtatatcacatttgttgacttgcagatgttaaacaatccctgcatccttagtatgaaacccacttgatcatggtggattacctttttgatatgctgttggattctgttagctagtattttgttgaagatttttgcatccatattcatcagggatattggcctgtagttttcttttttgttatgttctttcctggttttgatattagggtgatactgccttcatagaatgatttagggaggattccctttttggaatagtgtcaatatcttttggaataatgtcagcaggattggtaccaattcttctttgaatgtctgatagaattcagctgtgaatctgtctgatcctggacttttttttattggcaactttttaattaccatttcaatcttgctgcttgttataggtctgtacagagtttctatttcttcctggtttaatctgggagggttttatatttccaggaatttatccatctcctctagattttctagcttatgcatgtgaaggtgttcattgtagccttgaatgatcttttgtatttctgtggtattggttgtaatgtctcccatttcatttctgcttgagcttatctgattcttcccttttcttttcttggttaagctcattaatggtctatcaattctatttatcttttcaaagaactaggtttttgtttcatgtatgttttgtattttcttttgttgttatttccatttcatttagttttgctctaatcttgattatttcttttcttcttctaggtttgggttttgttggttcttgtttctctagttccttgaggtgtaaccttagattgtctatttgtgcaatttcacactttttgatgtagacatttaattctgtgagctttcctcttagcacctcttttgctgtatcccagaggttttgataggttttgtcactattattgttcagttcaaagaatttttaaattttcttcttggtttcattattcctgcagtagttcttggagaaaaagttgacgatgtgggtatccacatgctgctctgtccctccaagtgggagctgcaacctagtcctgctcctatccactaattttttcttgaactcctcctaaatgtgtatttttattaagccattaaatttgtgatgtttttacacagcattagaaaactaatacaaatgcatactggatgctggcatcatattctataatgatgattccatggcaagggagataagaagcttgctctcatacatcataatgcttaatgagggggagacagatgtaacaagaacaatcatcgtgaatgtcaaaggaaaagggaggtagagaagcatgtcgcaggaccctaatataaggtcagaagaagaccttctttgggaagtgaagtttgaaacttgaaggatgagtagaagttagccaaatgaagagatggggaagaaatctccaggtggatgaaccagagctccaaggagaacaaggaatgtaaaaaagagaatgaagagagagacaggcaaggagacacagataggagaatcatatgaaacagactttgcaggatttgtcgagtaagaactgcctgcaaaggaaatagaggaggcaatcagagagtaggtcaaagaaacatgtcctcgggttctgtattttagatgagtgaggctttattttccttaaatgataacaggaagaaggtgatagatagggaaaattggagataatcaatacagcaagtccatgaggaagtcagacaagatggggtccatttcacaggtagagatagaggctgtaaataataaggtcttacctccactatagcaggaagaatgaaaaagaaaaaaggtgggggaaagcaagtatgtttgcagttttagtggtggcaatttcagagaggtatcttctgctggtttcagtttttctctactcccacactagaggtcatctgctaaaagtgagcattaaaagtttgaggagagaggagagggtttgaaattgctactgcggagaattatacaaacaatttattggagaagataggattgccaataagtgctaaagatgtaattcaagggttacaagaagtaattagttgagctctataatcctaagtgaattaacacgggaacagaaaaccaaatatcgcatgttctcacttataagtgggagctaaatattgagcacacatggacataaacatgagaacaatagacactgcagattactagaagttggagggagggagaggggcatggtttgaaaaactacctaccaggtactatgctcactacgtgggtgatgggatccataccccaaacctcagcataacacaatatacccacgtaacatacctacgcgtgtcccccccgcatctaaaataaaatttgaaattaaaaaaaaactctggcacaaatacagacatgattcattaagggtgctttgggcagtgagtcagagacaggaaactggggaaaatgtgagagaagactggcaaactgaggacgtgtcatttggatggggccagaaattaaagaaaaaaataatcatatagtgaatgaaatggctttagtatctagattttagaacaaagaaaatttctgtgaatggaccagaacaagctattggtcttagatgcacctaagctctctggttttggttttttgttgttgttgttttagagacagggtcttgctctgtcactcaggctggaattcaatggcacagtaatagctcattgcagccgtgacctcctcccctgtcagcctcccatgtagttaggagcttttttttttattactattttatgtagaggcaaaggtttctctgtgttaccaaggctggtcttaaattcctggtgtcaaacaatcctcccacctcagcctccaaaagtgctgggattatagacctgagtcaccccatgtgggttttgttttgttttgttttgttttgttttgttttgttttaggagaagagaaaacacattcaggcatccaggttcagggtccaaaaaccaactcacctctgcagactttatagatgccctagattcactgcgcccctcaagggaagaaacctcaaacctctttacgcctcccacagtgggtttctcctatggtgtggttctctgttcccatcttcactggcctcctctgcccatcttttcttttttaacataagatccctatgtcatattgacccttttctctctgttgctctttggtctctcatatgtcactcaaacccctaactttggggggccactcagaatccccttaactctgtctctgtttttagatgatttggacagtggctatgggatgctgcacatctccccaacatatgccagtgtgagagaagggctgagcacccatcacagctcttctccataggagagagccctcccaaaccccgcagctcccacccaccaatgtaggactcctgtttgttagtcactcctcaggaagcatctggatttcagatcaatgtctccaactgcctgctggaaataaccacctctacatccttaaaggatctcaatatagcaggccacctgtctcctcatgcaggaccatgctcttgataccttgcacacaaatgcacttgttatcctcatattatctttgagaatcaccatcttacctgttgtccaagtcaaaaacttgggagagttatccctgacatctcccttgcctttcttcttacagtaagtatgtccaaatcttacagatgttacttccttagtatctctcaaatcagaaattggatggtgttttgtttactgtaaaagcttcaatgacaccccctccaatgcctacaaggtaaaaatctaagttcctttatagagcaggtcaggcccttcatctctcaacatttgcctgcctataatagaataatattttatggcattatttttccttttctacaatttattttctaccttcaaggtttgcttatttacatatattttccagcctataccacactttcatatgcttttttgccttttaataaactatgtgctcagttttacaatatcctcccctaatttgtccacctctctggtgttacttctcctggcactaccactcagaatgttttattttatgttttcgtggagcttactgctcatctctgttatagcagttatcaaaaggtattgtagttagctaactgatggccaaggtcatgtcatagtcactcaggcatccttagcaaaggccgtgcctactaaacagctagtggttaatatttgaatgaataaatgaatgaacaaacacaaggtgaagaggttgctaaatttctcattatcctcaaagtttacatgacaaagacagcaggagtcatggcacaggttctcagctactcattttttttttttaatcagatgtttcctctttggattttgttccaaaataacaaagatgaagagagttgtagatccagtgtagaaattatgaagaggtggtactgaggggatatgggaacagaggcgcctcagtgggtatccataattttcaagatccatcttgcatagctatgaacacctgtgaagaatccttcacttcctagggtgacacttccttctgcccaggacaagattccatgcaacctcccattgcagatggctggggcagccgaaacatccttatagagagaaggaacagaaggtcaatgtgtccttgtccttatggaacaagagtaaatgccagctgggcgcggtggctcatgcctgtaatcccagcactttgggaggcagaggtgggtggatcacaaggtcaggagatcaagaccatgctggccaaatggtgaaaccctgtctctactaaaatacaaaaattagccgggcgtgatggtgcgtgcctataatcccagctactcagcaggctgagaatcacttgaacctgggagacggaggttgtggtgagccaagatcatgccactgcactccaggctgggtgacagagtgagactacatctccaaaaaaaaaaaaaaaatagtaaattccaaaaagcggcacataacagtagcaaaaccatctaagagaatgggcttatttttcttgagaggtggcagacttctctttacatccacataagtcttacttctaaggttcaagcttgacccaacccaagtgcaagacaaaggacaaatagttctaccccaaatctctcccactctgaaagatgagaagggcaatggttagaaacccagaggtgagtagggagaggagagggactccagctctctgcttctctctcttaggaggccttttggatgagtgctctttgattctgcattatcatcactcctcccatgggactcttgctatcttccagtatagagaagggagaaataccttgtttttagataggatccttagagggtgtcctacacaaatgatgtttcctgcctgttcttctttgagtctatcctgacagtcacggaatggaagagaatattggttgatccatgtcaggatgtcaggatcactgactgtgggaaagagaaaacaaactccagagtgactcttcttatcacaagggctcttctaaccagatcctgttttgtaaataaattcagtcctgagaatattcaatgcaggtagcagcagacactccattctccgtaggattccttgttcagtaatctccatgttagagaagtaggtttataagtcccctttgtcagatatcaaatccataggtctttctgtgctatgcatcatttataaaattttgaaaaaactgtgagttattagtgaccacaaggagaaagagacagtaacgaaaccattgtctcaaagattttccccctacacacacacctttattgggcatctacttgatccttttcacgtttagttataaagggagaaactatttttagtgcatataaaactgctttttgagttacacagattatttataagtgtttatagtatgtgtattgatataaatatacatatatatttcccccaagaagttgtcatgttgttcatctccataatagcaattgctattatactgtcaaattcaggatacagggactttaacgaaggtatcatgtaatttaaatttctggtagagaatagcaaagagaaaggaaacaaaaacgctgaccaggccgggcgcggtggctcacgcctgtaatcccagcactttgggaggccgaggcaggcggatcacgaggtcaggagatcgagaccatcccggctaaaacggtgaaaccccgtctctactaaaaatacaaaaaattagccgggcgtagtggcgggcgcctatagtcccagctacttgggaggctgaggcaggagaatggcgtgaacccgggaggcggagcttgcagtgagccgagatcccgccactgcactccagcctgggcgacagagcgagactccgtctcaaaaaaaaaaaaaaaaaaaaaaaaaaaaaaaccgctgaccagagattgctcaagctaagtccagtgttgtttaaggagcaggattttttctgatagagtgtatccaatcaaatgccctaaagcagattaggccagaagttgtcaggtcagagaagaaagagaaattatgttcagttttatgtttttatgggaactaaattaaaatatgtgtaaaaaactaggtgaaagtaacttaagttacttgaaataatgaatttctaataaatattggaagccctgcaccagaaagcttatagaggtagagtttgtcactgtgattttgacatgcagagcctatatacctctgaatagttttgttttgttttcaaattgtacgtaataaattacttctgtaagttgtaattcaattactttgaataagacttacaaaatcaaggacaaaaatcatacaagctgtaactgttcagaaaacatgttcacttagattcccaagtacttgcttctaagtggaaaaatgaatctgcaaaatactgagaatataatagtttctgctttttatttctgttttttaccaaagactgacttctaaaattccacttttatttgcttttacagagcacgtgcattgttctgtagccaccagagagagatttaaacctgattaatagatccaggacaacttgcttgagtgaacataacttttgcagtataatcaatgtcagccttcacttcttaaaaccagctgatcaggatcagaggtcctctgaaaaacacgcctcagagcaccaatcaatcaacagcaatccccctgaagtagccaggcctcaacagatgatggaacccattcatacctctgaaagtcctccaatccctcaactccaagcttcccacaaaccccttatgctaatcagcactccattctgcttagtgggatggtgcctggtcagcattgctctgacttgctgtaataagcaatagatttacatttgtcatttcatttcagatatcaagtggtggtatcctcatcctcaacaatacctaaggagagaataatggagtaacagccaacaaggaccaacaaacttattagaaagtagttttcttcacaggtgttctttattagacagactcctgctgagaccggatctttctgctcatcccaatttcagctcacaggggagatggatgtgtgcttacaacatgggctgccactgtttttcttgtgaggcatgtcagaccagggagataacaactgattatgtcataataatcaatttccctacgaaccaccaaagtctccacccctaaatgggaactctgggaagaagcagtgggtatgagtagcactctgtgcagggaaccagctctggtgacaggacaggtactccctcaaccattctcttctctcccagggttctctgcacataactgggttctctgcggaaggtgtaggaagcatcttctgctgcttcaccgcatcacatatattttatgttcatttcccccactgttcttccattgtgtgatgggctttcagcaactatcaatgggtgtcaccctcccgcaggctgccttcatactgtctttgtgcacgaggactcctatttctcccacctgtatttcaatccagttctctggactcttgtcttcaatattctagagatatgaaaattactgtctgctccatttgttggtgtcagagtggctgccctttatcagtctctttgaattttatctttgacctccagtgatggtggtttgggtccctggcaggaatccctctatggtggacaacattgtctcatagcagcgatttccattagggacatccctctacattttctcccagctccaacctcctcagcataaagaacacagcatccaacacatacggtttttatattcattccaggtccaggttggaataaagcaggattcattaaatggaatgggttccaaggctatggctatagtccccacatgggggttgagtgaagcaggtgttgatagcttgatcatcattaggtcatcgttcaaggattttgcatcaaagtcagggtaggtcacaatcgatgaatagtttcatatctgttgtttcttgtttgtgatgctaggttgagaaactcccagtcgaatttcaacactttggaagaaagagggcagagagatgagaagaaagagagtcataagataatggattacaagaaatcctacgggccaccctctttaattattttaactttatttcttaacctgagaactgacatggccttcttttgtctataaaacaatagcagtaatttacagaattgttgtattagagacataaatttgtaaaatgtctgacatcgtgtctggcaactaaaacacaagtcagtggagccttgttattaagatttttatcatctgaattagcagctaatagagaggcagcacacatccagttcatgtgttaagtatggatgtaagaaagaacatctgccttttcaatttttattctggaaggatgtgaactgtgtatttcctttgtatttcccatataccacagagcagaggttagtctgcgttaaactaaactgccttgaacagccagatggctaagatttctgaatttgaaagaaccgttctatactcatgaaactgagtaggtcttgatcacacagcacattctcacacacaacagaaacactgagatttgcaaggaattgctttattttgtatcgtgctcccttgccctctactgtcactgcatgatatggcttctgcctaagtctttgacctcatcctatgagcgatccccctgctcattacccttaattcctgccgatttctcagcttaatatctttgttacttcagggagtatatgaatattgttcccttggcctggaatatcccccaggatttattcatttggctggctccttctcttcctatggatctcacctcttcagagatgatggacatgaccacattaactaaagcagatttcttatttcatgcccatatattagagcttgccattaaaaaaaatactttgtttttggccatttatttgtggtggctactccctctaccaaaatgtaagctccatgagggaacacttattttcatcttgttccttcactgtttcatcagtgattaagtagcccttgctagataataaatgtttaacaagtattgttgatgaatgaatattatttactacccatgagagggaatcctctgacatcttcctactgatctcctcctaaactgcccaaatttgtgttctgtttcccaatgggaacaagagtctctctttttccgtgtcttctgattttactaaaaattttctgggatgcttcaccagatctacatttgtttgaacagattcctcccagctcgcaagagaaagggatacttacggtaaggggcagtgggcagctgtcaatacccagtcaaggtgaatgagagaccccacgcagggttctgggaaggactgaagatagaccatgtaaggaatagtaaaattatatgtcagctcctgattatctttagagtctttagccagagcagctcctggagaatcaaggggccataggtggaaagggaaaaagaagttaaaaggccagaactggctagggtagttttccctaacctaaggttttcaaatgtaatgtaaaggtcttcaatttacctttcatattttaatcaaggaaaattatgcatgtcctctaagttatacacaataagaaaattgacacatggttttgctgagatgaaattacattaaaattctgtgaaacttacttacatgctgatcagaagctcctattggcagtgctgtgtgttacaaagatgaaaaaaataatgactacttgaaatttttttttaattcacttttgccataaatgggggtaaaaaagtatggcgtgatttaaatttttttaaattcacttttgccataaattggggtaaaaaattactgcctgactttggtgatgaaagaaatagaaaagcttagggcttccagagcccctgacccagctcaccccccttttccaggcccatgttctctaatgtggttccttttgttttcttcaacggttgttttatttaaatgtcctccgcttcctagctgtttagttgtgcccagctactcctctttccaatctttcatagactatcctgggtgtcacaataggcagaaacaaagccccaaactctcaccagctgcactcaagagagcgacgatgagaaaacccttcgtggcagacagatctcgccaggaacagacaagttgatcaagctgtaaactgtcccaatctttagtccaagtgtccttgccaagaacagctgtggagattatgggcagaagacagatgagaggagagcagtcttcacatgagtccttatcaagacccaaatatatacggcattgctgggagccgtctctgatgtgggtgaaagagagtggcacagaccaagccgaggtcctggtgcctcctttcctatcctacaaatcttgcctggagttattatgtacctgctgattttccttctcctctctatgacacaacctttctttgttgtctccttctccctctgtgacttaaaccgctctccctgcccatcttgctgccatctcacctcttccagagacttccagaggattggggtatgaaatgcacttaataaatcattgcttttttcattccttgtaattttagtgatgaggaagctatggttctcttggaagttagtggcaaagtcaggactcagaactcagtctccatattctctgtgtcaaggctgaactctatcttagcctgtgttcccagaaaagagcaatggttaagaaatccctccatcgttttgtgttcttagaaatgaattaccacaaagagctacctttcctatatgacttaaataagactctctgccccttctttctcccagctcccagaaaattttgcatggttctcttgcttacctgtgatgcatcaaatacagacctttcctcttttgcccggacttgctgacatggccagacatggaccatccaactccccattttttgtttcaaaaatgattagctgagattagaatggtttgtctcttcgaaactagctacattaaaaaataaacatttcctattcagccaactaactgaggcttccccctgattgtaaaacaacccccactataaatctccccacctcaaacttatctttttctccctataaaaattccagggcaaaaccaccctgccaagatacttcataatcttcagatcttggatgctctcctattggatgatctgaatgcaaccaatctccttactagttcactttttgtcttctatgctgattactctcaaaatgcatcccattttttctttttattagctacccgtatatggtaacttccagcctgtcccacagagacgggtaataacagtaggttcaatcccacattttatatagagtagactggaaaaatgcaaactatatagtatcaaactgatctttatcagagtaattaaggagctgatcagttataaaagtccataaacataacattcctatatctgtaaaaattataggcagacttagttctcctaaaatttaattattaacttaaaacctcatcagtatgttcccatgtactctaaacttttggggacaatatttctttagtacccaaaggttttaaaataataattattaaaataataaagtcagtatttgttttgtaccatgtgacaaatactgtgctatatgcccagcatgtgtgacctaatttatcctttatcacaggcctatacattaaatatcgttattatccattttcaagctgaagctctgtatggttaaaaaccttgctcacaaccatactgttgaagcccacgacccccaacattttaggaaatccagcatccctctacttgttccaattatttatctggtaggactgggccttatttctgctaagttctttgcttatctccagacttctttgtcccagcacatgaaaacagctgtcttcattttatttcttaattcaccactaacctaattctagggtgggtttcagacttttactgaagctttggagatattacaggaaattttggcaccagcctgaaaacatctttaaatagtatatcagaaatcactttgtgaatgtttatgaatcacctacagtccacggagtctgttaacctataacctggtttctgccacattgctggaacctaccctgaattccttttttattttcttgttttcttcatgtctttagtcagctcacatttctgctgcccagaagccccaagtagagagagacaaacatctacccttttaagctatcggaggagaactgaaaatttttgttactatcttacattgagaaatccatattttctctctctattctcaatctctgcctccctcccacaaagcctcaccaatgagaatatgaaggcgactattgttagtttcctttcttttaaaatgtctttttcttttcttttctcatggaaagaataggctaaatacaactatttgctttgtaaagaagtgagacgatacaatttatttaatggatataagagattatagtcactatcttctttataatttctcgtataatattctaataaaggtcactcaattgtgacctcggcaagcataattcactgcagaggcagtggcctagagctgtcagtttcccctggaggctcagtccagggagttgctgagttggtactggcatgacagctctggtgaggggtggctggaggcccaggcctggaggacctgcccagtgaggagatatgggaataggcacctacgtaccagtctggccacttttctgtagggttgctgcaatatgcttggggcctgctccagtctctagtcaccttggattttctagaacctggaggtgtcaccaatgaaggctgcaaaacagcaaagatggtagcctgtccctgcctctgggagctttgtcccagggaggtgcagacatattggcagcccaaaagcacctgtaggatgtggctggagaaaccttacaaaccagaagagattgcaggtctacattcaacacaattaaagaaaaaaatcttcaaccaagtgtttcatatccagccaaactaagtttcctaagtgaaggagaaataagatctttttcagataagcaaatgttgagagactttattatcaccagacttgccttacaagggatcttgaaaggagcactaaatatagaaaggaatgattgctatcagctgatacaaaaacacacttaaacacacagcccagcatcactgtaaagcaaccacacaaacaagccaacataataaccagctaacagcacaatgacaggatcaaattcacacgtcaaaactaacctttaaaactaaacaggctaaatactctacttaaaaggcacagagtgacaagctggataaaaacacatgacccaatggtatgctgtcttcaagagatccgtctcacatgtaatgacactcatagcctctaaataaagggatggagaaaaatctaccaaccgattagaaaacagaaaaatgcaagggttgcaattccaatttcagacaaaacaaagatcaacaaaagacaaggaagggcatgacataatggtaaagggttcagttcaacaagaagacctaactctcctaaatatatattcatccaacacaggagcatccagatccataaagcaagttcttagagacctacaaagagacatagatccctacactatgatagtgggatacttcaacattccactgacagtattatatcattgaggcagaaaattaacaaagatatttaggacctaatctcagcattggaccaaatggttctgataaaccttcacagaagtctccaccccacaacaagagaatatacatttttctcattatcacatggcacatgctctaaaattgaccatgtaattagacataaaataatcctcaacaaaagaatcaaaatcataccaatcacactcttgggccacagtgaaataaaaacagaagtcaacacaatgaaaattcctcaaaacaacacaattacatggaaattaacatgctgctgaatgagttttgggtgaacaatgcaattaaggtggaaatcaagaagttctttgaaaataatgagaacaaagatacaacaaaccagaatctctgggacacagctaaggcagtgttaagaggaaaattcatagcactaaatgttcacatcaaaaagttagaaagatctcaaattaacaacctaacttcccaatgaaagaattagagaggcaagaacaaatcaaccccaaaagaggataagaaataacacaaataagagctgaaatgaaggaaattaagacacaagtaaaccattcaaaagaccaaagaatccaggagttggttttttgaaaaaaaaaaaaaaaaaaaaaaacaaagccactagttagctatttaggaggaaaaaagagagggtccaaacagacacaatcagaaatgatgacgggaatgttactactgaacccacagaaataaaaacaaccatcagaaaccaatatgtacacctctacacacacaaactagaaaacctagaggagatgaatacatttttggatacatacaccctctctagactgatccagagagaaactgaatccctgaacagacctataacaagctccaaaatttaatcagcaataaatagcctaccaatcaataaaagtgcaggatctgatggatccacagctgaattccactgtatgtacaaagaaaaacttgtaccattcctacagaaacaattccaaaaaattgaggaggaaggacttctccccaactcattctatgaggccagcatcatcttgataccaaaacctggcagaaagacaggaaaaaagaacacttcaggccaatatctttgatgaacaaagatgtaaaagccctatacaaaaatacttacaaactgaatccagaagcgtatcataaagctaatccaccatgatcaaataggcttcatccttgggatgcaaggttggttcaacatacaaaaatcaataaatgtgactcatctcataaacagaactaaggataaaaatcacatgattatctcaataaatgcagaaaaggcttttgataatattcaacattacttcatgttaaaacgcttaataaaccaggtattgaaggaacacacctcaaaataataagagccatctatgacaaaaccacaaccaacattatactaaatgggcaaaagctggaagcattccccttgaaaactggcacaaaacaaagatgccctgtctcaccacttctattcaacatagtattagaagtcctagccagagcaatcaagcaagagaaagaaataaaagacaaccaaatgggaagagaggaagtcaaactatctctctttgcagatgacatgattctatgtcaagaaaaccccatagtgttggcccccaagctccttcagctgataaacagcttcatcaaaactgcaggatacaaaatcaatgtacaaaaatcactagcattcctatacaccaacaacaaactgagagccaattggaaagttagtcccattcacaattgccatgcacaaacaaaaaaacccccaaaacctaggaatacagctaatcaggggggtgaaagatctccacactgtgaattacaaaacactgctgaaagaattcagacaagacacaaacaaatggagaaacatcccatgctcacagataggaagaatcaatatcattaaaatggctatacttcccaaaacaatttatagattccatgctattcctatcaaactaccagtgacattcttcacagaactagaaaaaatattttaaaatttatatggaaccaaaaaaacaagcccaaatagccaaggcaatgctaagcaaaaagaacaaagctgaaggaagcaagttacctgacttcaaactgtactacaagagctacagtgactaaaacagcatggtactggtacaaaaacaggcacatagaccaatggaacagaatagacagcctagaaataaggctgcacttctatgacatctcatctttgacaaagctggcacaaacaagcaatgggacagagcctctctattcaataaatggtgctgggataactggctagccaatggagattgaaactggaccccttctttacaccatgtacaaaaatcaactcaatatggattaaagactaaaatgtaaaacccaaaactataaaaaccctggaagacaacctaggcaataccatcctgtacctaggaatgggcaaagatttcatgactgtattagtcagtttgcatgctgctgatgaagccatacccaagacttggcaatttacaaaagaaagatatttaactggacttacagttccatgtggctggggaagcctcacaatcatggcagaaggcaaggaagagcaagtcacatcttacatgacggcagcaggcaaacagagagagcttgtgcaggggaactcctctttttaaagccatcagatcttctgagacttattcactatcacagaaatagcatgagaaagacttgctgccatgattcagttacctgccaccgggtccgtcccacaacacatgggaattccagatgagatttgggtggggacatagtcaaaccatattaatgaaaaagacaccaaaagcaatcacaacaaaagcaaaagttgacaagtgggatccaattaaacttaagagtttctgcacagaaaaagaaactatcaacagagtaaacagacaaccttcagaatgggagaaaatgtttacaaactgacaaatgtctaatatccagcatctataaggaacttaagcaaacttacaaaaggaaaacaaaggaccctattaaaaagtgggcaaaggacatgaacaaacacatctcaaaagaagacatacataaggccaacaagcatatgaaaaaaagctcaatatctctgatcataagataaatgcaaatcaaaaccacaaggagatatcatctcacgtcactgagaatggctattattaagtcaaaaagtaacagaggctggcaaggttgcagagaaaagggaacacttatacactgttggtgggaatgtaaattagttcaaccattgttgaaagcagcacaacaatccctcaaagagccaaaagctgaactaccattcgacccagcaatctcattactgggtatatacccagaggaatataaagcattctaccataaagagacatttccagaaatgttcattgcagcactgctcacaatagcaaagacatggaatcaacctcagtgcccatcagtgacacactggataaaataaatctggtacatataccccatgaaatataacgcatccatagaaaagaatgagatcatgccttttgcaggaacatgaatggagctagaggctatcatcaaattagcaaactaacccaggaaaggaaaaccaaataccacatgatctcacatataagtgagagctgaatgataagagctgatgaacacaagaaggaaacaagagacactgaggtctacttgagggggatggtcggagaagggagaggagcagaaaagataactattgggtactgagcttaatacctgggtgatataataatatgtacaacaaaccccatgacacgtgtttatctatgtaacaaacctttacatgtacctcaaaacctaaaataaaacttataaaaaagcataattcagttcccaagagatttttcctggatgtgagatgatgtgtggcttagaaagtattcctttattgtttggctctcttccctacaaaatgtaaattctaatttcgttcctcttaaatatgaactggcataattttggagaacagtttctaaaagtcaataaatttccatctggctctcttcttcaaatattcttagagtacatctgctttgctataagtaagctgaagccatcccatctggaggcaaatagagaagccatgcacaggtgctgtggccaaaaatcaagctgaagtcccagctgacagacagtatcagccaccagacctatgagtgaggaagtctttgagatggctccaagcccagccaccagctgcctgcaaagcatgagagattcccagcaatgactgcctataggagcccggtcaaatcctaaagccatgagaaatagtgataacaagtgattgacattgctatattctgctaaatttgaagtggttttctatgcagtaatcaataaccaggactggagtcaaatcatttccaactctactccgttttctaatggtgataggtgaagcaagtatgccaagagggtgattctgcctgagtggttccggggtccctgttgtgtcctcccaatcctgaaggactggaaagcaatttatctgggtccattagtttgctctaatttcacgtttaagcctcaattctggggagtggtggcttgatggacggagggatcaagatcatccagagaagggtttggcagggcagtttaaagtgagcatgaggtgtgattctttccacctttagaactaaaatagaaaaaggattagacaacgctcctatgagagaagatgttggaatctacagtagaaaagataagagtatgagtgttcataatacactacctgtaattctcatggtagcctctgaagcttgatcataatgagctctgattatgacacattttgtagccatacgcccttgggcaagtttcttatctctggctttatcagtttcctttcttgtaaaatgaaaagcccattacatcgattgtttttaggaaaatgaaaagagttagtgtttttaaagtggctttggacactgcctaacaaatagtaaatgctagttaaatgttggttaaataaaataaaataactgtaactttaggattcccatattttccaggctttcagggacagtaatttatcttatgtcaaaatattgttgtgaagttcttaaatctttatgatattttcttgtttctttctttgtttttttttttttttttttttttttttttttggttaacatggtgaagagcgtggagaaggacgtttaactaccttaagcctcagtattctaagctataaaatggaaagaagattagtacttacctcataagatagtcatgaggattaaatattatttaaaaacacttaagcaccgtatatgacacacagaagataataaatgtgagttatcatcactattacctttttcacctctgcaaaactcctgagtactagaaaggagaaaaccttctggatgctcctggttcacaggattgtgtgatttggctccagcaatgtcttggaactgggtccctcctgaggtcagtgattcagaattactggacttcttaggtttcagctcttcctagctcaatacccctctctctaaagagaaaaagtattaccccctccaattctactcatgtttcactagggacatctcgtgactagcatgaggctcagaaaagatgtggagggatgagagggtggagcaggtcagtgctgggaagcctcccaacctgaatgggttgcactcattgtcagctggctttcttcctgcagattagggtggattaagggatttttgtaaggtgagaaagattaatactacattttataagccagacatcctggaaatttcattaaagacaaatgttatctttgttttataaaacccaacacctgtttatcaagaaaaatgcagaaaaggaacaacataaatatgaaacaacaataaaaacctgcaactccttttagagttgctcgcattgacatgtcaggcaccacaaaatgatctttttcctttaccccattctttatattttttccctcgccaaaaaagtaaataattcttttttctctagtgattctcctgcctcagcctcctgagtacctggacctgcaagcatgcaccaccacaccccgcttattattattattattattattattatagatacaaagccttgctatgttgtccaggctggtctcaaactcctggcttcaagagatcctcctgcctcagcctcccaaagtgctgggattgcagacataagccattgcacccggccaaaatttaatagttgtttatactaaaatttcttctctttatattgctgatgtggtttgtatttcctgaatgaatctggagtaatacaatgtctgaggaaaaacctttggtggaacccacagctatgggaagataaattttctatggtgtgaagacactttatttctaatatttggtaatgtcaatatatgattgacaaagaaatataccttccccatcctgcctcattcttgttacccagatgtgggtcatcttttgcccaaagccagtgtttaaagctcatctaactactattttattccattctccaaatcagattcaaaactaaaatacagtagcaaaaataaaaattgttctggacactacacaggaaactaaagaaaataatttgtattatattaccacacagcataattttctaaagacctattttagttatttttattcttttttgaaatttcttcctaagtctatcctaccttacctcttttcttcttctacatctctaatgtctctctctctctcttttttaaaagattattgtcttctccattagatccagccttcagtttgcatatctcactcagtagaacatggcaggtagccatcctgtgggagggtgtaactctcccatcccatgtggcttatgaagttattgattgaacaaaaatgtagctgatttgggttgaaagaagggggttaaattacatagctaaaaaaaagaataaaatattttgttatgcctctttctcaaatgaaatgagagattttgtccttttttttttggtaaacacatgtaaaacaatgtaataatgtggagaacatgctaagctacagtgaagaaaatttatttttcctagacatggcagtaaatggaaatttctttatcaagggcaaaataatcctagtagttaaacaggaagaagaaaatgaaaaggacttcaggggattaaggagggagttactgatttcaaaactgcagtttcggagttcaaagtgttgatcatcaaaaacggaaaatgtgattttgaagtgaggaaaccccaaaagaaagttaaatgataattcagtggtgagagtcacatcggagcagtgtctataattcttatgagtgctccttggaaaagaaaatggaggaagaggtcctgtgggagaggcagttatgtgtaaagaaactttagaggcttggagaggcgtttctcagaaatctgcccagcctttccattctacatgcaatagagagaaatgcagtggggtgatgagggaggcttctaacacgccaggacaacaatccagtgactcccagggaagcataatcttttgtcttataattttttaaactgcagatatagtacatgagtggtatgagaaattaccacaacacaaagttgtgtgaactgtgaaagttccccttacgaatgaagacaaaactaactttccaacagttcttcagaacatatggccttatattttctgtttggaaaacagtgtactctactgctatcagatctttgagccagaagctggccttggaggaaacctgtggcctttcactgcatgggtccctccaagtctaataagagtctcagaggcagagctggcaagggctaagaacactgcaaatagaaatggaccacaaaaataggaaagtcatttaaaaaatgaagttggattatgcacacggacgtgtccttaaaaataaactctgttaagtaatgaaggctttgcatggggactgtgtacataaaatcacagtagactgttgaggtcatgttagagcgcttatataactctcgggtaagttttgatgaagggatttgtgccttgcagtgagaagatgagatcagttagtaaaggagaaaatgaattgatttattctgtagaagtagggaacttgttaaaaaaatggagaaactaagaaattattgaaaactatgatttcttcaagatgtctggaaatcctatagtttagatggcatacaaatagaaagtggttagactgagctagtcagaataaatgagtatctctaggactaagacttttgtatttgtgccccatcaacaaattgacattttaaattgacttttaaaagtgagactaaataatatgaagatagaaaatattttattttttaaagacattttaaaatttgatttcaaaactaaagtcactttccatgaaagataaatagtggtgttacagcaaaataataaattaaataagatttataggggaaaagagataatttatttatagagataaatttagcaatttatcttattaagacaaatgttcttatataaatattcttgaagccctccctactcctaagcttccatttgtgaattttttaaagactttattagtcagatattctgttccttgcaacttcctaagagatgtgttcacatttataccttttttttttaacttaaacgcttattttattagggtgaatttataaaagctaagttgttgtttaaaatggcatatgacatatacagtttaataaaaattcacaaattgtaaagcattaaacaaaataagagactgaaactggcaagaataagtactaaacaaacactattggataacataaaggattaataatttgtttgcctttttcttttctctggacctgccctgatctctcatcttctgtgtatctcacacttcctgttaagtcttggaaccttccctctatctggggtgggaagctgaataggtaggtattgatggtggtaattaagtggagcagaaaagtatttcagagggaacagggaaaacttaatctcattttgttcaaggcggaagcccaagatgttttagttggggtagatataaggctacctatttacacaaagagagctatatatgaaattaatttagattatacacaaacataaaaacaattcaatgagaacaaaggaaataagacagaaaaggttagttgtgatcaaatatttgagaatgttgaatgcaaggctaagaaattttggctgcattttaggggcagtgataaggcagtattaagagctcagcttttctctacaaacatgccatccatacttacaaaaggatagaaaattgctaatgggcacgtatacctttcagtactctcctcctctgaaatatttattatggactgcatgtttgtgccccacttcccaaattcgtatattaaaaatttaacctccaatgggatggtgttgaggtggagtctttgggaggtaattaggtttagataaggtctagagggtggcccccatgatgggattaatgtaccaatttgtaagaagagaaaaaggactagaactggctctcttggccatgagtggatgcaactagaagatggccattaggaaacgtggaagctatcctcaccagacaccagactacctggtgtcttgatcttggacttcacaggctccactgcaagaaataagtgtctgttgtgcaagccacccagtctgcgatatttttgttatagctgactgagctgcctaagacagtacccttccttcaccttatcactgaaccacaaataaactcccatttccaactgcctccacctgtaccgttctgttttctgatcccagtgtgtcttttcctttgtctcattccagataaccatgagagtcacgtgcagggtcttctgctccaagccctcctttcaatgccacacagaacaatgaagatttgagggacgactcgtggaagaactaaagccagagtctgtgatgcactcttcaaacaggactgaagagaatagataatatatctgtagccatttatgacctcaaggcacaatatctattttctgcaaacttatctgaatttgtacctttttgtttctgtttgtagtttaaattagtacatcatgtgggctgggatttgggggaacttgtggtgaaaaagggacacagattgtctccagagaccaggcctgctatagcaaatttctagttggaaaacaagaaagatcttggaggaaaggaatatacaggtaggtgaaaccttggaaaacacaggaaacctgtgaattttaaatatttctgcatctacaggtttctgctacctagcttcccagagtttcagacagattgaagaaaaaggaaagaaagaccattctgttctatcagcagcaatccactgggaatgcccacttgggctttatcttagctttactgtgaatcttttgaatgattttgggcaattaagtttaattttctgcattttagtgtcattatatcttgtaaggtatgaatgcatgatgtaccataaaagttcatgttttcaattaattgatttttatttttagagatagggacttgtgtctcctaggctgaagtgcagtggcacaatcaaagctcactgcagcctcaaactcctgggctcaagtaatcttctcaccttagtctttcaagtagctggaactacaggcatgcaccaccatgcccagataattttttaattttttgtagaggcagtgttgtccaggctgatctcttaactgttgcccaggctgatctcaaactcctgacctcaagtgatcctcccaacctggcttctcaaggagtttggattacaggcatgagccaccacacctggccccagaaatgcaagttaaaatacatactgtggccaaatcttaaaacaaaatttatctgacatatttttagagttcttgattttgtaaaaaaacaaaatgtggtggtaacagtgacctctaagcttgttcacctttttattctcaatgtatcacatagagtttggcatatagttggtgatcagtaaacttatattgattaggttgaattaatgactaaataactgcattagtccattctcacactgctataaagacatgcctgcaactgagtaatttataaagaaaagaagtttaggcagctcatgattctgcaggctgtacaggcttctgcttcttgggaggcctcaggaaacttataatcatggtagaagggaaagcaaacacatcttcatgtggatggcaggattaggggggtgcacccacttgaaacaagctggttttgggagaactctatcacaagaacagcaagggggaagcctgcccccacgattcaatcacctcccaccaggccccacctccaatactgggaattacaattcgacatgagacttgggtggggacacacagccaaaccacatcaataacctttcacattttctcaatataatagtttggccctatgtccaccttcttaacagctagtttcaagagaaagttaatcaatgccgacagggaccattcttgaaaagacgtggtacaagacagtatatttttatttagatactgtgttttggcatagaaagaaggtaaagttgatgaataggatatggaacatgaagagataaaggtgtttagttggcagcaatggtctgctgaatccatttcacgtagttgcaaactttagtgtagactccaggtttgttcttctgaggacaaccatagccccaggagacaatgccctggagttctccgttgcagaccacaggaacaccagagtcaccctgggcaaaaaggaagggatattcagagatcttatttatgcccagatgggagaatgggccgtaagatgttcttccattgtgctggagccattgtcccacactgctgatccagcatgaagcactttctcttcctcttgaaaccctccaaccctcaatctacttactatatcagtagttagtcttccttataccttatttgagccccttctctttccttggtaggccaagtgggccaagaggaggtttcatgctgcttaactagctctgctccttccgctagagttcctttccacagtttacctcctcagaagggcacttagaaatactatttgcacaccatcttctgtgcatcttttaactcttaaacctagacattaatacaataaaaataaaatatttaatttgtcccaaggctatccctcacctctcacaatcagttatagggactgttttacaatcttctgtgtttctgaaaaggggaattatggtggagaagactaagaataagctggaattgagaagcagtacaaagaaactaacctggcaagagtcctttcaaccctccaggaatcccagacatatcatgtttgtagtaatcttgcctgggtaggctgtgcggcaagcagtgttagagagaatgggagccttcagacactgcaggagatcagggtagttggccgtggagtggaagagtgaaaaatgcaagattactcatgaggtttccaaaattttctttctcaatacatctcccctcttccccaatactctcactttttctttcaattagccaacggcttctcatttgagagaacaatactttcttttctagaagctttcccaaatagttctaatcaatgaattgttccaattcattccaattgaatgctccaagcaagaccaaatccctgagtctttgttttgtttacctcctcagtttatagttctctgcccatcactaatcacacttcagttaaataccctgatatcttcatagtacttcattattatgtcttctgcatggttccagcaaaggaatcttcttcatttcaattattaatagtatatttctgagattccatgtatccaaaaactatgctctgggaacttaaccttaagtgagtttggactagctgactttccacatgtctttcagctctaaaattgtcacacttggtacttctgtttcaggcgacactaaagccactgctcagggtgttgtcccagccagagatgaggcactgagtaccagccgctgcacaggatcttggcagagagatggtggccacttgagagttgatggtggcgactgagctcagcttaatcagcatgatgtcattatcaatggtggctgagttatacttggggtggcaaataatcttggctgcatttatgaattgttcattgccttcatagaccttaatgttgtattctccaagatgcacatggattcggctggattaaaagatataagaggttcctaagtatctagcttgagttatttccactcctcctgaccccccatttatgagcataaacacagacaccatccttttcaagcaatcggtcatacagtaattgtgcacttaaggtagcattctgcaccaccacatggtacaggttagagttttccttagagaagtgtcactgcaagtgcagactcactgcccgccatcttgttagaatagtaaggaatgggaatgagaactcaaggacttgaataaaacagttggagataaaaaggaagttggtggagattgatcagcatttgccatttctctctggttgggatcaccagttatcacagggaatgaagcaggagtcagagaaatggcagaatgttaagggaacagaatgaatcatgcatatttttaatgtgcactgtaaattctctgtattttattacttccatatacagtttatactggctgagctacagtaattagcactatgtactgattcatgtcataagctatttctagggatagttcatcactcactatttcccttccatatcttgaataccatcatttgggaagacatcagggaaccctgaagggtacctctccatgcaaatccccctttatacatcagataatgcctgagaaaataagaagtctctggaggtctgaatgcctcaccctcaagcacaactctgcagtttactctggattgtgttttgtcagggatagaggattaattaatcttagtgcataagaaaatgagtatcaatgaattacgacttatagcagtgagccgtggacacctcccatttgttattgatgagggagccaccacagaagtgatagccagcattcagggaccctgataggggacagcattcgtctgacaggtgtagccccccaacgatcttgtcatcatcatcactagtggggaaagtggctgacagaggaaagttgggaactatcagttaaacagattcatcttaaagtttctacaataccatgaaaagttttctcagatttaccaaaagagcagaacgttctcttgtctcacataatcaggaaatggtggctttaaggtaatttgggggggaaatttattatcccatacctttaaattgtaccccacttataacattataactatctattttttaatttatgctttaactttgataaatgcattctttttttaatatatgtactattcagacacacacacacacgagcgcgcgcacacacacactcaaagatcagaaactcttgacacagtaaatgtcctgaatatcacttcctgaagacacaaggaaacttttttcacagaactctgctccgcgccatacaattaggtgtaatgcttttcagtagtcatgctgatgttggtttgtggtcgttggtaggatgttggtatgggagagagagccccatacagtaacagaaaggaagctttaaaaaggcacctgaggctggttgcggtggcttatgcctgtaatcccagcactttgggaggccgaggcaggcggatcacgaggtcaggagatcgagaccatcctggctaacacggtgaaaccccgtctctactaaaaatacaaaaaattagctgggcgtggtggcgggcgcctgtagtcccagctactcgggaggctgaggcggagcatggcatgaacctgggaggcggagcttgcagtgagccaagatggcaccactgactccggcctgggcgacagggcgagactctgtctcataaaaaaacaaaaaaaaaactaaggcacctgagaattttctcgtctggaaggaaattagagatttatatttttgctctcctaatttctcttcttgattccagtctagaatttttattaaaatcattttacagagtattataggatgaccctcttcagcctttcctcttatcccaattatctttccaacacttacgaatttattcagcttttaaagtctagcccactttatatcttgtagctccaaaagtttgtgattatattttatgagccccattgttcagatatttttgatagttttaggaaagaagttagcaggtgtgtagacagatgaattgaatttatacctgcctaacttgagaaaatttagtattaagttttagtcttataaaatttagtagtataaaaggaaaactcatcatttttctattatattcatgatgaaatgacatgttactttacaccagagagatatccatggcaaaaatatcgtaaaacacagcccatagcttttattcatgagaaagaaaattgcttttccctttggctttatatcactagccctttagtgtggagaagatgcaggctctgacacctgcagcctctttaagagcacacgattagtttcaattattaactccaaattcttggaaaggtcaggataagcgcctccttaatctgggctatcttttccttctctctccttcttccttaatattacccagaagttgagagcaagtcctgtgtctttatatcttctaccctgatcacttttgctcactgtgaacttcctccaacaagtgaaatttaattatccacaaacatatgtattttgcactgttgtttcaatattttaagcttcttgaatacagagaacagattcaacattcattgttgtcttccagagtataaagtacaaacttaagtttatgttcgacatccgctgattcactcattaaaagatactcaccagcagctcccaggagagcaggaagatgaaggtcttcgtggttgctcacttcacctggacttggaaataggatgacacttttcttccacagccatttataccaacggacttgtcttgacattctggccacaggggccagaaaagtgatttcactggaaactcacaaatctaaatctaaattctgtgacagatgcaagataactcaacataaattctaaacattaacatttgcctacttttctagagggtcatgggactgaaagtaataagcccacctggtagaaactgtaccccataataggtaagtaaggcggagtaaggtcacaggacagagttacaggtgtccagattcccagataaaaaatcttaagtagttgggcatctcaactgtatatgtttattctaagaacgactgcacttttgaagtttcataatgtagactcttttacaattatatactttgtcttttgactgctctggtcttatatatccatgttagcttttctctttttaaaatttcaactcttattacaaattaaagggtacatatgcaggttttttgcataagtaaattacgtgacacccaggcttggggtcccaacaacctcatcacccaggcagtaagcatagtacccaacaggtggtacttcaccttctcattgttaaaggaacagcttgtttcccttagaaaaagaagattgctattaattgaacttataatagagaaaaggaggaaagttaaaaaatgctaataacttataattttcttgagcttataattatcttgagcttactgtacttattctaagtacttattgaataagtcagtaagtatgtagaatactgacatacacgtatgtcagggatattttaagtatttgcccatattaatttagtaatcttcacaacaaccatataagatacctattataattcccactttacagatgtggaaactaaggcacacaaaactgtaggggatttgaccaaaatcacatagcaaatacacggtaacatcagcattccaacccagaaaaatcttccttcagagtctgtggtcctgaccactatgaaacacttctctcagtaagttcaccaaaatctggatgccaagataatgcaaaattcttggacaatgataacatagctgaaatttttaaagtatttactatgtgtccagcactgtggaagtggattacgtgcatcaactcattcagtcttcacaagcagcatcgtaagtgttaaactacaaatttcaccatttaagagatgtggagaaagaggctaaaagaagtcaagtgagtatatcaaagtttcatagctgttaagtggccaatctatggttaaaacttaagcagcctcacttcagggttcatgccctcaacagtgatgccgtgaatataataagagagaacagggctgggcgcagtggctcaagcctataatcccagcactttgggaggccgaggtgggcagatcacgaggtcaggagatcaagaccatcctggccaacatggtgaaaccccgtctctactaaaatacaaaaaaaaatagccaggcatggtggcgggcacctgtagtcccagctaatcagaaggctgaggcagcagaatcgcttgaacctggggagtggaggttgcagtgagccgagatcacaccaaccaactttatcgatattccaagacctctgggaaacagcaagagtatgataggagacatccagacattcatcaggaggattcttcatttttcaagtatggcaaatattgttgctgaagttattcataaacatgccttcagagggaagtatgggatttacagacctcatctggttaaggactactcttgactttcttgatttaatagagttttactgtgatgacacaaagcactgttaaacagagctgcgttactcgaagaatgaaatactttcaatacaaccaatggataaattcttctctcactgtgcacattacctctcttggcctttttataatctaatttcttatcattcataatcagtccctcaaatactgactctcacctgagctcttctcagatccaacttctactgaacatgtctgctcccatacctagggtcagctagtctagcgctgaattcatcatagctttctctttctatattttctgtcagtgcaatgaagctacacacatatggttagccaaacttgaaacacagaagtcacccttaacttttttttttttttgactgagtttcactcttatcacccaggctggagtgcaaatgatgcgatctcggcccactgcaacctcctcctcctgggttcaagcgattctcctgccttagcctcccaagtaactgggattacaggcgtgtgccaccatgccgggttatttttgtatttttagtagagatgggattttgccatgttggccaggctggtctcgaactcctgacctcaggtgatccacctgccttgggcttccaaagtgctgggattataggcctaagctaccacacctggcccacccttaacttctttatccaccttgcttactacctgtattcaaagtcttgacgattttacctgtcttaaagatccttgacttttctttgaagatccttgattttcctttcaagtcaaccacctatgacttggttcagtatcacattttctctcctgaattattgaaatcgtgctaaaaccacttccttgtttgtggctttattctccttcaactcactctccacatcagagtaatctttctaaaatgcacatggatcattacattttccgcttaaaatgctttggtggctccacattgacatcaggataagtttaaattccagcaccaaagttcatgttcttggacactgtatgctgttttaaacctctgtgccttcccacacaccttacctggttaactcccatcattcttcaactctaatcgtggagaactctgaactccacctgcattctccaactaaagtcaggccttcctgaactttctaggcagctttactttcattacatttacttccagtcacatattacttgtataaatatctgcttaatgtctattttttccaggttgtttaaaattcctgagggcataaatgatgtctgatttgctcactattacacttcaaagccggtatgtacgtggcacatagtaattgctcagtgaataactgctgaatgaatgaatgaggttactttccctctttgctggtgaacttctagtcatccattaaatttacctgaagtatcatctctatctataattaatctctgacattaacctatgacctcccctaactctactgccataatgccccaattggttagatgctaatccgttctatttcttatcggtgccattttgaaaccctgtgcatgttgctattataacttttgaattttgttgcaggctttgatttccttttctcttcaactagaatatgagcttctgaagaaaatattgtatgttaaaatttccagtttatgacactgtctctggcatagagtagatgcttaagttcttctgttcttctttgccccattgggcacttaagccttgtccaaaacatcttcaccaacagtcatccagcctctattctggacaggaaaccacaggaccttctggaaacttcttccttctgtcgagctggaaaatcgtcttgttagagctttgactctttttctctctgtcctatagcttggggacataggatcaggagagagatagtaagaagataagtagacaacaaagcgaaaagaagattgtaggttctaaaatagttaaagatgagtcagataagtgaaaactccagcccagcaaatatacatttttctctttaggtagcagttacaaattgtgaaaggaaatcaaaaaagtgtctccctgttactgggaaatagcatgccaggtagtagtagtcaaagctaatgctggcttctttgtagacaattcagcagaaatagtttcttagaaaaaaaatacttggaacaggattagatagattgccctaacatctggcttagagtactctccttcaaaaaaccttctccaattgcatcaatccccaactgataattggttttctatatagtctatgaatgctgatgagaatagtttgggcccgattatttgatggtcagtcaaatatcatatagtgattttaaaaagttatttcttctcaatattggctcagtcacaccatctagaatattcacacacactgaaaaccaagatgaataacctgtagtttttttttatttgtatggatttatttccccctttcacatggtacccattgcaatcagggtccttctatatatttgtaaacccggacaaatcaagtacaaacaagctcattagctgcaaccaccaccctgtacactaagaagatcttcctgaaaggtcctgaggtcttccctgatcatcgcccatgtcagatgcctcaagttatgcaataaacacacagcgacatgaaatacagaggactaacgtgcatttctttgtatctgtgtagaagggaggcctgttggaaggtgacagagaccatgcagcatgtggaaggtgtctccccaaaagtggggtggagtcaaaaggggatgaggaaagcagcctcctgcagattgtggaagccccagcagactgcaaagggcacccgtggggcaaggcatccctcgtgtggtgtgtcagaaattggactgaggtgaggagagtttcaacatgggtggtctccatggcacaggaagtcagaacttgaacggagagaggtggccatttacaaaggagagatgatggcagccacagcacacatttagttacctgtaaagggactaatcaaatatgtaaatctataaggataacagaaccatgtttctcagttattggataagagagttgcaaatatggaaagagaaaacactagaacacaagaacataagaataaaccttataatacgggattggaactagtgtgaactcatcgcttctcaatatgtatagacaggaattaaagatatctgtaaatatatgtgtactgtgaaaacatatgtgtatgtacagctctgtccactgtgatacctaagagtagttccccccaaaagcaccccaaaagatctagtatccatattctgttttctaaataccactgtccactagaaggaaccaggactttttggacatatagtagatacaaagacaggcaggaaaagcctagaaccccttgtgccataaagtaaggaaatgctgaaagaatgatggggaccctgacaggaaggagaatttaagaattaacaacccctctatttccgtatcatctttgcacaatgcttcatcaacattgaaagattattattcataaataaaacctttgaaataaaaattgtttttatcagttacattccagccttacatactgagactatgacccgatttctgtagatttgcagatacaaatataccaatgccaaccatagcagattagaaatacaatttttaagtgcttagacctaccttttacatatgatttttactgttttccattccatctatctattcattgaccaactaagcaaatatgtattaagcacccgcactctgtaaagtattttgacagtggccatgaaccatgtaagcttctggcacagcagcctagtgaagtctaccctgcttggcttacattgtttcggagctgggtagacagttggggaaaattatttcagcctctccccacaaccagatttcaagattgaggcaataagaaggtcagtagatgaaatgatttaggcacctaaaaccctttaaccctcctaaagcataccctgtaaaactttccaaattagatgttatctctaaacatgtcaaacatgtctttctttttttaagatggagtctcagtctgtcatccaggatggagtgcagtggcacaatcttggctcactgcaacctctgcctcccgagttcaagcgattctcctgcctctgcctcctgagtagctgggacttcaggtgcacgccaccacccctggctaatttttttgtatttttagtagagatgaggtttcaccatattggctaggctggtctgaaactcctgacctcgtgatccgcccacctcggcctcccagagtgctaggattacaggcgtgagccaccatgcccagcccacgtcaaacatgtcttatagctcctgtaatccctgaagcactttgagaatgtgaatattattcacaaaagctgtttgaacaaattaaaatggcccatgtgcccatgagagttggttttattcactgttatattcctggtcctcaaacagtgcctgacatatagttatgtgttccataaatacctattggataatattattttgatatcttaagtgtgtatatggaggttgttggaggcatttcaccagtaggtggtagttagagttgctaaacctttacttcggcgtttcaaatgccttcttgttttgtgcattccctgcggaatccctttgtattctattctctcaatgctgtatcaggaggactgagggcagatggctgacatgagggcaatgtgcctctttcacctccaggaggagctacgactttagtgaaattcctgagtcatgtggagggagaagagaggcaggagggaggaaaggactaacgaaggaatcaaatgctctggtatcagggtttgctccttgttgtagttgagagaccatgtgtggacaacttgaagacactaaagtccattccacctggacctgcatctctgcagtccctctgctcatgcccttagggcctcctgttattctagtctgtgttcaggtcctgcatcctaagtaggtgagatgctccctgggggtaggggtcgcagattatttctctcatgtcccctcgagcacccactgaaaggtgcttcctccctagttggcattaccttactgggtcttaaaatgatgcacagctggctccagggaagggctccactgagctaggtgaggtgtcctcctggaattcactgagatgagggaggggagctggagtgtgctcatcctgggtccaagacaggcatcgggaaggcatctgcccaaagggaaggggtctgtgtgttagggaggaggggagccataagtagaaagaggaaggggagacccattcattcgttgtgggaagggcaggcagctgctaagaaaaaagcaactgtctaaagaacccgccctgcacacctggccctgagaagctagtctaaacccacctcttgaggtgccagtgccaagcttggaaaggaaagaggaagtgtgagctgtagacactaatagtgacaccaacaggagcagagacttcccaagcagcccctgtctcagggccagggaagcacacccagacgacaaggacacagagcagggagacacagggtccccctgcctgtgccccgggtgaccctgccatgggctgaagtctccactgtggtgtggtccattgtctcaggtgagtcctgggcacaggtgggacatttctgtccttaaattttttgcttttttcatggaactgcttcagaagattctgtcctaggcttagtctgaatttggcttcttattttcataggctccatggatactggaattacccagacaccaaaatacctggtcacagcaatggggagtaaaaggacaatgaaacgtgagcatctgggacatgattctatgtattggtacagacagaaagctaagaaatccctggagttcatgttttactacaactgtaaggaattcattgaaaacaagactgtgccaaatcacttcacacctgaatgccctgacagctctcgcttataccttcatgtggtcgcactgcagcaagaagactcagctgcgtatctctgcaccagcagccaagacacagccctgcagagtcaccgcctccctgtgcacaaacctcctggatctaatcagaaaaccgtgggggcaacgcatccagctgagcctcagcactcggttcagcattctgtaagacctcagcagacatctcagatcataatactgtcatttattggatgtggcaatgctaaattgcccagactcctgcagcctgtggcctgagtttgtcttgaatgagactgtgcctgaacttgaatgtaggacagatgccgtcaagtttaagtttttccaagtatctttcagtcggtttgtgcctctgggaaatgttgtgtgaggtatttaacactctggcctcaccaatccaccttccaatatggactgttttttgactttcttttgactcaagttagacccggatctcagccctcatcccagctccaaatatgtatggtcagaccttttcttttcttttcctttctttttttttttttttcttttctttccctcccttcctccctccctccctcctttctttctctctctctctctctttctttctttctttctttctttctttctttctttctttgtttctttgtttctttctttccttctttcttttttgagacagagtctcactgtctggagtgcagtggcgcgatcttggctcacttccacctccatcttccagattcaagcgattctcctgcctcagcctcccgggtagctggaactacaggcgcccagcaccacgactggctaatttttgtatttttagtagagacagggtttcaccatgttggccaggatggtctcaatctcttaacttcttgatttgcccccctcgggctcccaaagtgctgggattacaggcgtgagccaccgcgcccggcaggtccttttctttttctttctttcttttttttttgaaaaactaaagaatacccaatcccctcctcaggtggctctatcactgcctcaccctgaggacagtatttccccatggggtttggatcactgttctctagttccctctccctggggcatgtgcagagtttcaacttcttgttggctgctctcttccactcaggatttaaaacattcacacttgattctttttccttctatctctgtaatcctaataccaagttttcttggcattcattatcagccgtggaatctgttgtacctgaattgttactcacagcaggtaataagagaacaagacctcctggaatttctgagccagactttgtactcagggttaccttgctgacccccatattttccagcattgctcttattaattaatggccctcagtcctgcacacaccatcagatcccaggggctgagcacagcctgcattgtcaggttctgcaacaacacaaaggctccctcctctctcctatagagggcgctccagggatggtgggtgttgccagagacaccagtaattctgccagaccttgcctgtggggccatgggagctcaaaatgcccctcctttcctccacaggaccagatgcctgagctaggaaaggcctcattcctgctgtgatcctgccatggatacctggctcgtatgctgggcaatttttagtctcttgaaagcaggtcgatgcttagactctaggaaattcttgctttgaacttacctaagacaattctaaaccattctcttaatcttcttcttttctcacaggactcacagaacctgaagtcacccagactcccagccatcaggtcacacagatgggacaggaagtgatcttgcgctgtgtccccatctctaatcacttatacttctattggtacagacaaatcttggggcagaaagtcgagtttctggtttccttttataataatgaaatctcagagaagtctgaaatattcgatgatcaattctcagttgaaaggcctgatggatcaaatttcactctgaagatccggtccacaaagctggaggactcagccatgtacttctgtgccagcagtgaagccacagccttgcaaagacaactccagcctgtgcaaaatccctcacagagctgcctccctcccagccgccagctcccacttcctgcctaagaaaaggaagtctctggttgggtttgttcttgcagctgtctccaaatagacagatatctgaaattaaattaccaaaggtatcttgggcagaaatgaccagacactgtaggatttgaagaatgtttacagatactacagagtgtgagtgtgatggtgggctctgaatatgagagaattgtacacaaccaagtaacttatatcttctcctcattcccatttggccatctttattagaattgttttgttttagttgcttaggaaaacatattttaacttctagggtggcgagatgattcctgagtgggagttcaggtatttccatgagaatatagagggtgctcacagaaatcttcagaagaaggggcttggtacaaagaactcaattatcaatgactcttgctcagcatgtggtcaagagcagaactatctgatgaccctgtgaacctggtgtgatgcatttgggctaatgatgctagctcacaaaataacaagttaagagagtagaaaacatggagtctaatatttcacaccatttcaaggtcaacagagttctagaccagcatgagaatcgccagaataaagcaaggcagtgcaggaacagaattcagcagcaaaagtcaagagacacctagaggcagaggcaggaatgaatttgtcactttcaacttaacctgaagcagccagattaacttcttgagtttcatttaagaaattattcctcttttaaacatacctattgaagtctaaattttaggtattttatatatttcagttctggaatttccatttaaatcttgctacaatttccagttgtttgctaaaattgcacattttgtcatttactttgttgactatattaacatctgtcattttaaagccactttttgataactttaacatctgaatctgtttgggtctatttcttttgtctgttttctctgttcagtttctgggcacgtgattttgttttctcatacaactagtaatttacttgaatgccggatattgtatataaaaactatagagataatttgaggctctgaatgatttcatcttcctcaaatgattcacttttgcttctgctgggattgtagcaggggcggatcaccttaattgagctgatgaatgagctggatcagacctgagcttcagcctgcatgatggctgctcgcctttgctcttagccatgtaagttccaactagatgtctgaagtttaacagctaaatcaaattgtaaattacataacataatatttgcccattgcaagcatgcaattcaatgaattttgataaatttgtggagttgtgcaacaatcaccatgatccagctctaaaacatttcatctttccccacccggaaagttccttcgtgctcattttcagtcaatccctgcttctacccccagcaccaaggactggggtctttgccaggctcctctcctattcagtagtcactgaacgtaaatgttctccagaccagaaaggtggtggatgctcctcaaagcctgctacactctcagtcttcccttttcttctcagctacttagccaacgatataaaactggcaaatgacttaaggcgaaagtggtctgttagatctctcctttctcgttgagatcccaatcccttaagttcttactgcctcagtagctccaagtgccttcaaacgtttatttttatattttgttaagtttttctagttgtttttggtgggagtgttgttctgcaaaaaatcagtctattaactctgaaagccagtttctatatttattaaaggtgaggtgcaatgttttatgtttttattttaggtagaagtatcttgaagaaaggaaggagtgaacctctctgccttcccttttttttttctttttgagacagattctcactctgtcacccaggctggagtgcagtggggcgatctcagctcactgtaacctctgcctccggggttcaagcgattctcctgcctcagcctccggagtagctgggattacaggcgtgcaccaccacacccagctaatttttgtatttttagtagagatggggtttcaccatgttggccaggatagtcttggcctcttgacctcatgattcgcccgcctcggcctcccaaagtgttgggattacaggcatgagcctccattcccggccagattatctctatttctaagagttctattagccttctgcctttggtccaccatgggacagagtcttgacacgtttgaccttttaccacaaggaggagctgtgactctactgagattaagggaactcagaggaagggcagagcattctcaggatgggagacagttaaaagaaatattgggtttatttacaacaggggaaaatgtggtctgcagaagctgtgttaatgctgaaatgtgagaggataaatatagactattcatttgccttgctgtgcaggtgcttttgatctagcaaagagcctagactgccagatttgttgcatgtgaacctgcatgggatgagaaagggagagaatttgagctgggaaagagcagagctcacaagcagatgccagtggaggaactcttcctgagaggaataagagaggctctggatgctgggcctcttctccagttcaatcctgccatgaaatgacttcctggaacctgggcagtgagcctgacaaatcagggcttccttgagggatcttgcaaagagagtaattaccaagggaaatctacctatcagaccaaagaatacctggagcaccattctcctgactctaaatgatgaaaaacctaagctagaaagggtttttttttttctttttcctcttctgaatgttcctctaagttcttggagtgagggcttcttcgaaggataggaaacctgtctcctgggtctgagctaatggttctatcaaaacagcctcaccagactcccttccagcttccagcttcaatatctatccctgtctaccaagacccatggaagctagacttgtccagatatcaaaagatgatgccaaacacctggagatgggaaagaaggtggcgtggacagacctccaggatgcacatctgaaacaggctcttcattttgttttgactacagcctcctgtttcgccttttcaaaaagcatttggaatttcccttacttcttggaaatccaaaaatacagcaaagatacattttctataggctctagttattcagtaggagggagcttcagaatatctctatactctactatgcatattctagcatgctgcccggaagtgaaagtctagccaaacagtttaacaggaaaaccgttagctgtcctgtggaggttaattttgcagtttattttggaatggaacaaaagaaggtattgaagataggaatctcatttctatatgctagaatctaaatttcttaactttctgtagtatgggccattttcaaatcagctaaagtcctaaaaccagactatgggaaacacacacttctaagctcaatattaaatatctaaagtgactaactaacgtagggttggagaggcagggtccccctggacttttcaaactcctaccctcacaaaaaatctagaacttcttctcagtaacaaaaataagatgacgtataatcatttttcattgttaataaataatctctatccatcatggcattgcattgaatttgtgttaattgttgctaaaaaatgactgtgggttaaacatttgtgattcatataataatagaaataataaatgtaaatgttttaagtgaacaagtgagattttaatagctcaacaggcaaatagcatgaactgatgctctgcaaaggtgagggacacctggcctgagacaggatgtcttatctgattttggtctgaatttcatttggaaaactggcagctgctggtcaacctgcagggatatgatcccatgagctgatatgcaatgttgacttttgtatttttgtcagcatgaaataatttttttttttttaaatcagggtcagagtctcgagtaactagcagccagctgatagaatggaagtgaaaccatggccctcgtccccttgcaaacctggaaacccagtgttgagcatgtgtgaagagagaaacagaatcaggtgaaatgaaatcttcctaagaccctgctcaggaaactaaatttgacgtaattggacacaagaagttgttcatccattctattccgccagaggagacaggacagatttcccgtgcgttcttgggaagctggaagagggagacagctctgccaggtggagtgatattctcatgagaagtgaaaaagaagaggcagagatggagagtttggttctagaagggtggaaggttttgcttataaacatatcaacacacttgcttttcccgccaagatgcaaactttggggaattgctcaaatataagatggggtttaaatattggacagccaaaaatatgacccatgttcaaaatatgcatcctggtatcattcagttcgacgtgttctagttcttctgcagctttctgtctcattccttttgcccctacaactctccacctttttgtggattaagttatctccatgataaaattattatgttgtcttccctctttgactttcttgtcggcagcctggctcttcccagggatcccagcgtctatcctctctcctttctgtagcttttttccgcttctccagtatggcgggccctgtcagaaaatacgtacataatcaatttatttgtccttcttatcctttggacaattcttttgtttgtttgtttgtttgtttttggttgagaccaagtctcgctctgtagtccaggctggagtgcagaggcaggatctcggctcactgcaagctccgcctcccggcttcaggcctgcctccgccttcctagtagctgggactacaggcgcccgctccacgcccagctaattttttttttttttgtatttttagtagagacgggtttccccgttttagccaggatggtctcgatctcctgacctcgtgatccgcccaccttggcctcccaaagtgttgggtttacaggcgtgagccactgcacccggtctagacaattcttgatggacaatcaaacacttttgcttttcatatctcctgtaaaacacaaaacaaaacaacaaccagaactaacattgcctcatatgaggcgagtttctttctatcagtttcattccagtgcctctcccagacgctgtccgtctgatttggtaaaaagtcttgcgtaaaatagtgaaatacatatttatttaaagtctactctttaagaatggttacatctttacatagttatgatcatcaccattgaatgtagcctcttgtcatttcactatcttccctccccacccgttccttctttgaaaaggttcccatgtcagctgtgtggtgcaatgtggtaggtactgaataagacccacaactacgggggtacctggttatgttcacagaattgtagagctagacagagtgttgaaaattatttatttctgcccattgtttcatagatcaggaaatgggatgctttaaaaaaagtatttaaatgtaaatagtaactattttgctggcctccatgtaatatgtatttcatattcttagtctacaagtaatgtgtgaatgtgtttttgctcctattggattataagcatcatgagagtgagaatattgtttactcatgctttgcactaagtagccattcagtgactataaacaaataaagcatgcttgaagttccaagaaggatggtggtcatttttcttttgtttagttcaagttctgtgtttagtaaatcacaaatgaaccatcaaggtctgtctttgcaggggattcaccagtagatgacaacactaccaaagtgtgtgtgtgtgtgtgtgtgtgtgtgtgtgtgtgtgtgtgatacctttctggcagtgctggtctctggttttcctcctggaggttcctgccctggggccattgactgaggcactgaggtctgagtgctggaccttgctgacaagagcaggaggagctgcagccctgccacacccccgaggttgggtggttgatggctggcagaggagaggagtaccatgggcaagaataaaggggactgtggtcctcaacattagataattcacaaaacgcgaaggcattttctgtcgtcacattgccatcaggtgggtagggcccaaggatgccgccaagcatcctccctacacaggacagctccccacaacaaacaatcacctgatccaacatggcagtagtgctgaaattgagaaaccccgcaataagcttcggttgtaaactttgtaccaagaaggagaattctctgcagacaactcaaggggcaataccgtcaactacttttgttttctctgactgccgtgttgttgaccttcatcgccattctttcccagcacatggtgtctgcatattttccagcagcctcctgtttcctcataaatctgccccttggacagataagaacatcacagggagcagggctgcagttcactcccaataataacgcctcagcagggtttgctctgcagtagcatcacagtcatgtggagtaggtggctatggctggtattcaggtgaaatctcaggccaatctctcctgaatcaaggggaccactgatcattaatgagaccttcaagtgagcaaagattcaagagagcaaattaatgtcctgcgctattgtgaagggacgcaaaggatccagagaggaaaccagctgactctgagagaagggcctgaaaaggagaggaagggaggaggtggtcagatccccgggaaggagcagggagggagggggctgctggcccaggaatgactgtcagagacacatcctggaggtcacaattccaccctctcaattattcccagaaattccaaaaactcctttaaaggagcaagtgcagggcatgaaagggaggagccatgctagaggagaccctgggaatgggggaatgattacaggctgtgacctcactggcgcagcacctctcagcggcagtggaaaccacagcctagtcctctcaccactgcagaccagaatcctgccctgggccttgcctggtctgcctcactctgccatgggctgcaggctcctctgctgtgtggtcttctgcctcctccaagcaggtgagtcccgggcccaggtgacatgatcctattggagtccctaagccttttcaccatgacaacaacagcaggccgtctcctaggatttgcctgaattctgcttctttcctttgcaggtcccttggacacagctgtttcccagactccaaaatacctggtcacacagatgggaaacgacaagtccattaaatgtgaacaaaatctgggccatgatactatgtattggtataaacaggactctaagaaatttctgaagataatgtttagctacaataataaggagctcattataaatgaaacagttccaaatcgcttctcacctaaatctccagacaaagctcacttaaatcttcacatcaattccctggagcttggtgactctgctgtgtatttctgtgccagcagccaagacacagccctgcaaagtcactgcatccctgtgcacaaacctcccggctcagccaggaagctgcagggcagcgtgtgcacctgcacccagggctccagtctccattccctgatggcctctgatggagtttcagtctgtagtacagccagctagtgcacccagtggagaagtcctccatcttatgcacacaaaagtctcacagaattgtttatcagctagagcagggcttcacaacaaagccactaaagtattagggctccacaaacaaaaaagagcctgtcctatgcactgatgatcttaactgatgggggaagctctttcttttctttctgtgtggcacatattggtacgtattttatataacattatgaaaaaaacacgattgctgaaaatggttgatgagcacaagcataaaggagggggaaggaaatatttccaagatcaagagacaattctgatgatcagtgagtactttattcaacagaaaaatatttggagaggcatgaaattccatggcaataggtaaactggaaagtgttgaggagatgccggtggaggtagccttgtgcgttgtgggctccttctcttcaagaagggtgaccagcaagtgtctctcccaattctgatgaatatcatcttgaactgtcctcaacagcaggcaatagccagatgactggggatattgggagacctgaaaggactttggacacaaatctctaggcagtggtgagccattggtcctactccaagtgaaacaacatgatgaaactgatattttggtagaggaacactggtagtagtatggatcagaaaggagatagatttttgggtggcatgaatgattaggagacttctaaatatcctacatgaaagattagaaagggttgatgtgaagcattgtggacaatataggcttgaggctctgcattatgttatttcttggaaatgtattgggttttattctgggagggttgaatgtaggacttgctagggtctatttcagccttgccctccctcttagggagccccagcatgtggtcatcattgctagtgcatggcctttccagggtcttagtgggaatcacagtcacccaccacgactctccactctcactgggtctgaatgccattgccttcctgccctgggtatcctctgaaatccctgcccgtgtctacagccttccagagtttgttctctgctgggccttcgggagtgccaccctctgcatacacaacttaggacctggcccagaaagaaaaataaaaaatgaaaaaagattttcttacacaggttctcagggctccttggtagtactctgtgtcctaaatcccagctgtcttggagtcagttatgtcctcttatcttcaatcacatatactacttctattttatataaatatgtttacttggcttttcttcatatttaccattccactcttcactcttcttgcaattcacatggtcctgagatcattttccttcttagatccatccctaattcagaccacttgaactcgctggtcaccaccccttgttgtgggaaatgcttatgttagctgttgtcctcaggacaattaaacctttcgctttcaccattattcaagttttcagtttaaattctattgctttttttaaattgtctttgcaatttggtttacttattgagagccaaacaatgcaataaaattttattcgttcaaatttgttctactttgtagaagggccaaagtgttttcttgctgaagtagataccaatggaaacaattttaatggtaataatactagtgtttaaaataaggctaattttaggtttttatctagtgaatagaatatctccaactgtagcaggatagagatcgatcctatatgtaacctgttgagggggagaatactcaaccccattaaattctaatctacatgctttacattttttgtttgtttgttttatgggccacattgaaaatctgatgaaatttttgcattagaagaatgctacaattttcctcctgactgagaacatccccaggttaaaacaaatctaaattataaatccttgacttaaatcatggataagtatcttccctcagccccatgtagatttacatataacatagatttacgaccctaatctcatgcctacaattataattatcatcatgaaaaggtaacactgatgtaatacaacaataaatagatggtaaaaatcactttgaaagtatgaatcatctcatttttgtgtttatttgtgttcatttgtatctccaaatgctctagaatgaaaagccaatattggcataaaagtaccttttaagaaaattgatgatattccaattcttaactggtcacaaagcataaatagcttatgcagtgaagtacagaagacccataggaagtcatccagctggttcctagttggaaagttctccacagaactgatgaactaatgtggtttctaacatcttagaaatggcagggctttagagatcatctcatttcagttctcctgatttaatatatgaggaaatatggcatcacatatatgaagtgattgaacaatgacatactgattacatttctcaaactttatgtaagatatatttttattctctagttgttttctgaatatgttgaattgccttacacaaatagaattctgggggtgaaaatgttggtgattttctgcttgctcctagctgttgctcaaggagtatttgttgaacaagtcagactggcccaagaactcaagagggctgggatactgtctgttctgcacattactagagatccaggcatagacaattttctgttcttttttcttttctttatttcatttcatttcatttcttttccttttttttttttcttttgaggtgtgtggtgggagcagggtcttgctctgtctggagtgcattgacacaatcatggctcactacagccttgacttccatggctcaagcaatcctcccacttcagcctcttgaatagctgggactacacacaggcaccactacattccgctaatttttgtagagataaggtgttgccatggtgcccagacacagacatagacaatttctgttgagtaaaaatttagaatgtcttatgtgtgtggatacctggcgttctggctgctgactctctgtgttgttgccaacacctccttcgtcttcattctcccctggcctttcaaacccttctctgctgctcagggttgtgagatgtggaacccatctggatgctgacactgggtcggtgagtggccaaatactgttttggccacaggcaggagctgtgctctggtgaaacctctaaggcagggacctggggaagggatagagaataagaggagagatgggccaggagggatcttgcccatggggagccaaccgtgcctcaactgagagcatggctgtactcagcccaagcacactaacatcagcttcaagctgatttccctttcctttgctccacacaccttgtgttgttctttttcagcatcctgtgtatgttagctctaagcccagccaagccccatgccctccacttcagggacagagggtggctcatcccttttgtgctccctcagctccctccccagtgcctggtggctggttggcaacacagtcatgcccttgaatgatgggagctggtgcacactgcatccgtgttcatgcagtcaccctccctccacagagccgggcagaaagggctccaccacacttagacattgagggaagggacgttttgaatggcactgttttatgtgatcccgcaggacagaaggagatttcttgaatgggagtggtctgttgttgagagggatcctgaaagacagggagacaaagatagagggaggatccacataattaggaagcagctgagagcaaaggagcccctgccagaggaatatccttggggggtaaaaagccagctctgccctttctccccagccgattcatcctagcccagcaaattcaaatctaccttctatcagaacttagaaaggatgtaaagcagtcaggaagaaacatcccctgggtctggggaaactatcaggagcagtgacatcacaagaaaaaccaccaaccagggccaaggagaccagagcccagcacctcgcccaaaggaccccagtcagaggccccatctcagacccgaggctagcatgggctgcaggctgctctgctgtgcggttctctgtctcctgggagcaggtgagttaggttgaaattgtctgtccttggactccaacccttttccttgtggctgcaggaacaaccctcttcctgggctctgcctgaattttgtccctttcctcctacagttcccatagacactgaagttacccagacaccaaaacacctggtcatgggaatgacaaataagaagtctttgaaatgtgaacaacatatggggcacagggctatgtattggtacaagcagaaagctaagaagccaccggagctcatgtttgtctacagctatgagaaactctctataaatgaaagtgtgccaagtcgcttctcacctgaatgccccaacagctctctcttaaaccttcacctacacgccctgcagccagaagactcagccctgtatctctgcgccagcagccaagacacagccttgcagagtcaccgctttcctgtgcagaaaccttcggggcctgccaggaagccgtgggggccacggagggctcgggtgaacatttcctccaagagccccgaagaagcttcagaacatcatagcacctgctaattcatccatgtggcaactttacatcctatgacatatttagagtgtgggtttccttttgcctgagtgtgactctgccccgtcaactgatttgaaaaaagagaaacatattcagatctagtttaaaaaaaaaaaattttttaatcatgaaataggccgggcatggcggctcatgcttgtaatcccagcactttgggaggccaagacgagcggatcatgaggtcaggagtttgagaccagcctggccaacatggtgaaaccccgtctctactaaaaatacaaaaatcagctgggtgtggtggcatatgcctgtaatcccagctactcaggaggcaggagaatcacttgaactcgggaggtggaggttgcggtgagccgagaccgtgacattgcactccagcctgggcgacagagtgagattctgtctcaaaaaaaaaaaaaattcctgaaataaagcaagcatgctgtaaggattgtgtagcttaaaattttataagaaccctctaaacaatcacctgtgtcaccacagaggcacaccctgcactgggtcagacactgtcctgtgaggagctgtgttctcctgacacttcatgtccagtggtttccatgactcttctttggggccaagggttccctttcatcataggttgttgtcatgcagagtcaagcaacactgagcactgggaaatcagagaaggaacttccaggcaagggtcccagtgcagaagccagctagagaggacagtagtagactcaccctttgggaaatatgtttgagaaatatgtatctattttcaccagttctattactctatattacagcttgtctattctctaatttctcatttgtacactgaaagctagactgtgaattctagccctgatcaaagctccacatatacacagacaccttctctgaaccctgcaggcagcaaacttgcctctgtctgctccccttgctgcagagtccatggatcatggtctagaagtttcctgactcatccactctccttctcttggctggaagcctccttgttggtttcagatctcagcgcctccctggattgcctctccagactgacacttgaaggattatttttccccctttggtctctttattcccaatgtgttcaatcatcaggctcagagcctgatgcctccagagcgcagctctacattagcttttagagaggagagtgggtcctggctgttctgtttatctgttttcattcactaattcattcattcatttattatagagacaaaagattccctatcccaagatatatggtcatctgtgctgtatcaaaagagaagatattcttctcacagttttatgaaatgaggtagcttcgcaacttgcggggagcagcctcttaagttagttgtcaaaattaggcttttgcctaagtaaagttaggatcctaaattaggctcctactctcccacaaaaactgggagacagggcctctatcttccttgacgattgtatctcaaaaagatggttcctagagtcttgggaaagacattcctgggtcataaagctggctagaggtttacagagattttaataggattgtcaaaaagccttttctgtgtttattgagatgatcatctgggtttgtttttagttctgtctatgtggtgaatcacatttgttgatttgtgtatgttgaaccaaccttgcatcccaggaatgaagcctacttgattgcagtagataaactttctgatgtgctgctggatacagcttgccagtattttgttaaaaatttttgcatcgaattaaataatttttaaataaggtgacttacattaattgctttttaaatataaaaccaattatgcattcctggggcaaatctcatctactgattagatattaacctttttatacattgtgagttaaatttactttatttttgttaaggatttttgcttctatgttaatattagtactatttattcttcacaatttgtaaattgataaacttgctcaatttcatcaataaagtaagctgggcctggagttttctttctggaaatgcttttaattattatgagttcaatttttaaaaccacttctacatgtattttttaatatccctatggacattcaagttatccactttttgagtgggtaattgtgttttttggggaatttgtttattttgtctgcttttgaatttattggcataatattaatctttcattggagttctaatttgcatttctctaaggattaatgatgttgaggacattttaatgtttttattaccatttgcagatatgtctttttcatatacctattaatgcttttgcccagttttaaaggttaaattatatatcttttatattgatttataggaatcctttataaaatataaaggatttttatattatatagaatcctttatataatctggatacaatattctagtctgatatatgtattgtgaaactttttcctcagtctgaaaattttcctttccactttcttggtagtacctgggcacaacccctatgaaatgagagtacccttctgtctcctttaattttgtctctctaccttcacccttatcagtatttggcaggcaattaattcagtcagattgagagagtgcaaaggcttctagctagccctcacaacactggcttgggtacacctctaatctccaatcacacgaaacaatttgccagcccagaagctacccctgctatgtattctaccatgagtagaccttaaatgtgcacctcccactctctccatagtacatatggtagaatggtgatggatccttcttttggcagactttccacaatgcatggagctatgcctatccaagcacatctctgcatggacaaaggaaggggtggataattgagtcagtgtttctgcttcttgcttgtgagttttccccagtaaatcttgttttatgtgtatattgcacagggctagtgctgtctacatgtcccttcatatgatggtgctctcacagaattctgaggctggaaggaacaaacaaaagttctcataaagagaaatttaatcacctctagaaagaagtccgtgcttaatggctttggagtttctgtgaagaaagggtttcctcctgccttagaaggtgggcaaagtgagcaacatcttcaccaagtcaggaacacttgatttcagccagaggcagaagtggggttctatgataatgcccgattgtggttacagagggactacatgagcaaggccatggaggtgaaaatggattcatttgggctgaaatcctgtaaatgaagtaagcgggaaaacccagcgcacattccaatggaagatgcagcttcctaatattgtgctttcaacttagattctgtcatctgtaattactccacacactttctcaaatcattagcacaactgtgggccaggtaatcatttagcccctttgcttggtacaaggtagccatgctctctacttagctccctatttttctctgggaagcttttgctgagacctgcagtgaccatgcttctcagacttctctctttcttattgtcatttccatttatattttaactttaattgtagtttatttgattaacatctgacatgtttatgtttctcttttgcttatttgacctcacttaatgataacccaggtaactggtcagctgctgctaatcaagttatattttctggggttacattggttattttttcctctaaagtttctatctgtgtaagaattgaggtagcagaaccttctctctcttttttttttttgagacagagtcttgctctgttgcccaggctggagtgcagtggtgcgatctcgactcactgcaagcttcgcctcccgggttcacaccattctcctgcctcagcctcctgagtagctgggaaccttctcttttttggaaacagggtctcactctgtcacccaagctggagtacagtgatgcaatcatggctcactgcagcctcaacctctgagattcaagcaatcctcccacctcagcctcccaagtagctgtgactacaggcacacaccaccaccactggctaacttttttgtttacatttttggtagagatgaggtcttgctatgttgccaggtttctctcaaactcttgagctctggtgatcctcccgcctttacctcccaaagttctgagaatacaggtatgagccaccgcgcttagctcctcctattgatttctgaaatttaaatggagatcagactgtctccacgcaaggaggaagtcagacagggcagagcttaaccaatgtccacggtttgttttctcactgcagtcttggacttaccactcatctcttcattctctggctcaaaatagcttcagtcttcccagaagattctcatgattttcagtttgtttctggtttcttagttatttcttgtctcatcaggctcccctgaggaaggagccaggagatgctacaagtctgcaattttagggggagtcagatggagtgcactggtcttttgcacttctttataatattatctaagcctcctcttctttgaaatataatggctattcatcatgggatatgaggcatctcagaagcaatctaaatatctgtttgtttctttttctagtaaagaattgaccagtattctagcaattttattttaggtattcctttaaaagtaaaaaatacatagtttttcttaacgtgacttctattgatagtttatatttttatgattttgtgtagtagctttaccttccctaggatcagaaaccacatcagataatcagcttctattatgaaagaagctgattcttctatttggagagtgaggtatgcagaaaatccataaaaggtattaagttatagaacaccaccatctgatccaccatctgatcttgagagaattttaactggtttatatccatgaatactccctcagtagggtatttttgttctctggatggcatcttggaagaggtactggtcattgatcatatctcactggcacattggctagtgaccgctaatgtcacatgcagctggattggaatctcttctcattgctttctcatggggtcatttgcctttggacttaaaaatcaagaaatttcataatgacaatatctagatttactgtatatatgtaactattcttaaaatttgataacagatatgtcaaatgtagatatttaaagaaatttggattggaaatacactaaatcagaagtagcaagtgaaggatagcggttctgtaatggaatctttctcagattctgttttccctagtctcatgtttcttttttaaacccagtctggcctctccttcttagcttactaagtatagaaccacaaatagaaacttagaaatttaatcattttctgcacatatctttactcatatatgggaaaatgggcaagaggatattgtcagtgaactcaggcaaaaagaggatttctaaaagagagagtatagatgggaaagaaacaaattccccagcagcatgggaacagtgggtactgttttgtttatttttggataagctgattagttggcatgtagcacagagtggtctgaaaggtcttcttggagcaagctggctggagtcatcacagaaaaaagaactttaataataaatcatccacaaatccctgagagtctgcctgccgcaagggagacgggatgacttgatgtgattctggcacagttcttcctgcagcacacctacctgagctaggccaggtttgcatcatctccttcatcagcattttctcaaaggcaacatttcttttctatcacttttttcccttttacagtgcaaaaagtgatcttgaagaacataaattttaaaatgtgggggtttcttttagttcccctagagaaacagtataatagtcaagatggtgaaattgttcctaatttaaatatgtcccatgtctcttgcaccatgttagaaaggctgtatccatcagctcagacagccacagcaaatagcacagactgcatgggttaaatacaaatctttttttttcacaactccagagcatgaaatggggatgccagcatgtggggctctggtgagggccctcctcttggcttgcagagcaccctcttccagttgaatcctcacatggtggagagagaacaagctagccatcaagtgtctcatctcagagggcattaatcatactggatcagggctccacttttataaactcatgtaaacataattttctctataaagaccctattgtcaaatattgtctccctgggggttgtattttggagggacatcaatattcagtccactaacaatggcaaaatcttggttactgcacagtgggccacatgggggtgctgtggaaccactgagctccaaatgtctctggggcatgcacagagccaggagcctgggacagggagggttaaggagcagccttgcttgatgtttgtgctcactaaaaaatgtgatgacggatacataaaactgcaggtgtgcctctcatcagggagccatgcacttcagctatgcctgggttaggaagcctctgtgagccgaagagggagaatgaagatgggatgtcccatgctgggatgggacaacctgcatgtccagggcagggacagatagaggaacaactgcctggaaggaaaagcaaaggaactgtgggggggacatgcagcctaacctcagtccagccccacatggtatgtgagagtattaacagcacaaagcagaggtcctggatcgggtaagccaggggcctaacaaggaaggcaggatgcatgggaacccgcagagatgacatcagagtagtgatatcacagcctaacatccgatcagagatgcaatgcccaaaaccccagctctcagaggaccagtatccctcacagggtgacacctgaccagctctgtcccacctggccatgggctccaggtacctctgatgggaagacctttgtctcttgggaacaagtgaatccttggcacaggtgggatgtctctgaagcacgcctcatccaaggcaccctcaggctccctcctgtgttcttgccctagcctctgtctccctccctcacaggcccagtggattctgctgtgcagaacagagagcagtggacctcaggaggcctgcaaggggaggacataggacagtgacatcacagtatgcccctcccaccaggaaaagcaaggctgagaatttagctctttcccaggaggaccaagccctgagcacagacacagtgctgcctgcccctttgtgccatgggctccaggctgctctgttgggtgctgctttgtctcctgggagcaggtgagtccctgcagacaggatagcgccccattctgagcctgtcctcacccctgtgtcttccactttaccatggggaggcaccaccaggctgtctccggtgctcattctccatctgcttttcccacaggcccagtaaaggctggagtcactcaaactccaagatatctgatcaaaacgagaggacagcaagtgacactgagctgctcccctatctctgggcataggagtgtatcctggtaccaacagaccccaggacagggccttcagttcctctttgaatacttcagtgagacacagagaaacaaaggaaacttccctggtcgattctcagggcgccagttctctaactctcgctctgagatgaatgtgagcaccttggagctgggggactcggccctttatctttgcgccagcagcttggcacagccctacaaagccaaccacattctgtgcacaaacctccctggcccaatgtggagcaacctcagccctgacatatctgtgagaacctggggactgcagggagaaagaaaggcaatttagaatgctaggatccacagcctggggctttctgcaactcagggctggggaaaacaaggccaagagagcctgctcagaggatggtgctgcttccgtaggttgactgcagcattaccttctttgccgacactgtgaactacaggagtagaggaaatgtgtgtaatttaacagctggcgcactctttctcaggacaagagatttaattttgtggtcaagattgttgataacagtgtagtgtagaagggagaatcacagggtttgctttatacaacttggggagaagaaattgaggttttgggaaagtcaaggagagagaaaacgaaagatgattgaaaacagagatagagcagaaggtgatgaaaagtggtgttctgtgcaccatgaactctctttcccccacccgaaagttttcaacacctagaaaaaaataaggaaaggtcttatagccaccggaatcacctggtagccggtcccagtcggaggcatcaccaaattgccgcttggccattgtgagagccctggagttgcttctgctgtcttccttcttccagccctgatcttgactcctcaggccacagtcaggtacttcccaaaacacagaggaaggtaaagtcacccttcttcctaaaggggcaaatactttccagtttccccccaaataaattctgcaaccctgggattcctttctgacactcacctcccaaatccaattaccttctatgaccaaatgctctttgaacattttctaaaactcagcagtctctacatcctctgcgtttgtccttacagtttccatggcctgggaggacctttgttctcctaagacggggccacatactgatcatctgtcaaggacaggctcacacctgccttcctcttcacttcttactgtgacattccctgggactgtactgtatcactctctttcctttattttaaagccaagcatacaattgatactctttgatgtttgcaaaactaataagttattgccctctcatacagaatcctggagtgtgattaattactgtcttctctttacaagggactctacatgaaatatcatggagaatgattatgaatagtcttagtatttcatgtaacttctgtaatattcctagcaattgtgtcttcacagtcaggattgatgaccagtgctgtcaagttcccaaagggtatctaatgctggaatttgcaaatgttcttttggagtgaagaaaattatgttatttaggctgactgaagaatcactaaagaaagaaaattatggtacagtaatatttataaagactcataatcctgtaaaaaacttcctcaccataaccacactttccacagccacatttttagagatttggtgagggtggaatatagtcaaaggtgcttcttaatcatccttgatgaaatcaaccaaaatcaacctacaacattgaaaaaaaaaactagctttgctcagtaatggaatcttatcatccttgacaatgaaaagatattatgtgtttgtgagtgtgaatgtgtgtgtgtgttttcttgtggatactcactcacatagaagtttctcccctggtggcattttatgaggtgctggatcactggcagagctcctaggcacttctaggtaaggatagaaaatagcagacctaacggaatctgcctaagttatagctgataagatagtttatttcaagattttatacattcagaaataaatttgtaaaatcaaaaaatcctttttataaaatgtgcttgctaaaatttgtgaataattaaactaaatgcaatgtgtgaaaagatatgagtctgactaatcaaagggagctctgcaatgtagtattttcagcccagattggcttgatattgtcacactttcatcctgtggcctgtataattctggctcctttcttccatcttatgatgctcattgcaataatgtaacagcaatttcttgtgcaatcaagatgtgtccttttgtctccactggtcaagggtgagtttgaagttccaccctaaatcaacccttccgggaaagcaatagacagggtgtgtgaaagaatgggggctgcaggggttggagtgggggcaaccgtgttcctgacttggactatcctgagctcatcaggtcagaaggtgtgaatccatgggactgtggaatgttggccacttgggggcgctgtggccccactatgctgcagggaaccctggggaggggtgggagggtggccaggaagggagggcggaagggaatgcctggctgcctgctgacatcaggagattaggtggaaattagagtaggtcctggcctgggactgcccagggaaaggtagggccagggttggcaccaagcagggagtgtttctgcctctgcatgggcagaggagggtgtaggggctggggtggcaagggctgggaatcagtgtcaggacagggatagggtgggcagaggaaagtgaggtgtgatgtgggcatgcggggactgtgaccagccacctcccctttagttgaggggctgtgcgggacaggaaggctgcatggagctgctgagcctgagtctttcaatgggtgaacaaggcaggagtggcctgcagaaagagtacctggaaaaggactgtacccgaagaattgggtgacactttcttagctccactcagggagtgaccctgaggagggtgctgccagccagaggggctcaggtcctggtgagctgacaggcttttcctccagacacttcctgttgtttctgtatgtgatctggttttatgctcactgaaatcatgtaaggtaggtatgatttcacctgtttatacatctgaaggaaagcagctgttccgggtctcatattaagtaattggctgaggtgttttcctccaacatctctgcaccagccccgtcccccgactctatatctgtcccttcatctggcttcccctttccaggtccaattagcaggagcacaaggtcatgcctcatatgtgaccattgtaacctcttccctgacaagtccaaggaacacgtgacttccaggccaagcatatccattcacctttcactgaagcaaaacagaaggatgaaattatctgcactgtacacttcctgtaactgatataatctaccttgaggaaaagtaacaagaaaaattgttattcattagttattattttatttaatatatgtttggagatcctttctttgtatagatattttatgacataaaaagcaaaataaaaaagaacaaatgaaaataaaaaagaaaagcttgaaagaataataagtgtttcttactttttagagtattaaggtttgcattaatttttttaacttattcaaagacgtttgctcagtttctgaattatacagatttcctttttttcttctctttttctctttagccacctacagctttttctgccagcttttttagtttaataacctaaggctatcttttaaacagatttttaaatgtacaatatagtatcgtaatctacagacacaaggttggacagcagatctctaaagcttcctgattcttctttactgaaattttgtagccactggcggcagctgcccatttccccctcttcctagcccttggaaatcaccattttcatcttcacttacatcagtttgacttttaggttgcctcatataagcacaatcatgtagtatttgtctttctgtgcctgactttttcaactcagcataatgtcctccaggtttagccacattgtcatgtatggccagaatttcttctttttaatacttaatgatattccattgtatgcatacaccacatttaaggtctgaatattaaatgtatagtatcttattgtttctgcgaaaccatctgtcacaggagtggcagggtcatttgcagaacagtaagcactgagtatatgaatgcacattcattcgaagttcaattctgcttcatagagaagacttcaaaaaaataataatttcactatttattgttattttactatacacaaatagaatttcttttttcttttttttttttttttgatacagagtctcgctttgtcgcctgggctggaatgcagtggtgtgatcttggcccactgcaacctctgcctcccgggttcaagtgattctcctgcctcagcctcccgagtagctgggattacaggtgtgcaccaccatgcctggctgattttttgtatttttagtagagatgagatttcacagtgttagcctggattgtcttgatctcctgacctcgtgatctgcccacctcggcctcccaaagtgctggtattacaggtgtgagccaccgcacccagccaataccccaataccataaaatatttagcatatagtagaaatctagctatttttatttcctttgctagtctcgggcagcctcttccactgcgccaatgcccaaaggcagttaaagacacattttgcctggaaatcttagggtgaggactcaggaagccacagaaatggaaatacatatgcgtgatgattactttgaaagtatgaactagagaatgtagcatatatccctcctcaggcatttaaaactcagtattattgatatataagttatataagcattacacattttaaataaacagatcggttatacgtaaccaaataattaacagaatgaggagctcctgaaaagttttatggttttaaaaggggttgaagccaggtgagctaccagatccacattagggacaattctatctggagatggatattgtgatgaaacaacctcagaaggtcttctaacctggtacagactgattttacgaagtttatttattcattttctttcatttcttttcttatctgctcattcactccaattattttgtaatgatattttggcgaaaattaatcatctttaagggaaatattttgagtttcatcagacacacatgcagctgagctttgtgttcacacactgagtgccctggggccaaacaaaatacggtaatagtgaccttgttgagagatgacgtcacattgggagaaaggttctctttgtgttgacactaagtgtccaattcataaaacctaagccttgagctaggaaatgcccttttctgccctgggaagcaggctcctacattgtgtgtttttctgtctcctggtctagcctggacacagacagtgtacccactcacgaacttgttatatcctggctgtgaatttcagcaccaggtggccctttgctctgacttcaatttctgtgtccttctctcctaaacaccatggatgctgagtgactcagactccagtcatgtgcttttgccaaaaggaaactagcacaagaggaggtgagcagaatatgaaacaaaaccatgtactcaggaccggcaatgtgacttactggcagctctttgctcaaatattgtaaggaagttgaagatcatgacaatgttacagtaacagggatctctttaagtgtggggctctgtgcactaaaatacgggtttttttttttcttttctttttttttttttttttttttgagacggagtcttgctctgttgcccaggctggagtgcagtggtgcaatcttggctcactgcaaccttgcctcctgggttcacgtgattctcctgcctcagcctcctgaagtagctgggattacaggtgcgcaccaccatgaccagctattttttttttttttttttttatttttagtagagacggggtttcaccatgtttgtcagactggtcttgaactcctgacctcatgatccgcccacctcagccttccaatgtgttgggattacaggcgtgatccactgcgcctggcctttttttttttttttttaattgttactgaattagtggtgagaatcctgaccaagggaatattccctatgaaatatgacacttcaaataaaatgagagcgctttttcttatcctggagcctgcctcttctctcctctccccacatccctcacatgtcaagacacctttgtgcccacagatcatgggcagcgttgggctgccactatcatccacacagagagggcagtcagcagcgtgaggtggttctgcctgctgcggtctcaccccaggcacagaaagcaagagccctgggtggagctgaaggtgctcagctgggcttgtcaggagtcccatctgtcggtgaattgaaaagaaacagagcaaaatgactcctccaatggtgatgagcctgcccctgggatttggaaacttggtaacagagaaaaccaatatagacaaaggattttaaacaggattatggtcaattaagcaaattagaaaaggatacttgaagggggatttgggacacaggagtcaaaaacaccgggaagacatgagaagtttccctaagagtctaaattagagaaatatttagataactgacaccagtgtatgaatgaggaattatatcatcacagggataagagttccattgagttacaaactgcttccaaaaaggttaagaaaaactcgtaaggctgtgtcaattcagacaaaggcattcttcccattcaaacggttcaccggtgcatgaatcttgaatttgaccatctggggaaggggcgtggcctctcctgacaggaaggctctggggcccaggcagggagaatgaagtctcagaatgacccccttgagagtcctgttcccctatcaccgatgcacagacccagaagacccctccatcctgtagcacctgccatgagcatcgggctcctgtgctgtgtggccttttctctcctgtgggcaagtaagtcctgggcagggccccatgtgtggatttcaaggcccagcctgtttccattgtggctgcagcatcagctttgttcttctctgcaggtccagtgaatgctggtgtcactcagaccccaaaattccaggtcctgaagacaggacagagcatgacactgcagtgtgcccaggatatgaaccataactccatgtactggtatcgacaagacccaggcatgggactgaggctgatttattactcagcttctgagggtaccactgacaaaggagaagtccccaatggctacaatgtctccagattaaacaaacgggagttctcgctcaggctggagtcggctgctccctcccagacatctgtgtacttctgtgccagcagtgaagccacagcgctgcatggccgtctcctctctgcacataaaggcagggaggctctgcctcctccctcaccccagactcagtgatgccctgggcagagttctctgcaccaggaaacttgaaaccccatcatcatgggtctgaggcccccaggatgaaacaggatttgtatttcagatccatctagactctcgtctctccctggggaccatgttgcttcttctctctagggttccccccagcccccaccctcatgttgtctctccctggggaccatgttgcttcttctctctagggtttcccccagcccccaccctcatgttgtctctcctgtggcccacctttcccatctgggcagtcaccctccaaggccttgctgggtctctcctcccctcacttccccacacctctccacagcagccatgaggggagcccctcttctgtgcctccttccttcccatcacagagacttcaaagtccattttctctgccctgggctggaggcttcctttctgcagtggccaactcctacctgtgcttcacatctcagcatgatcagccctcctgtgggaagcatgcccttgcctcccagctgagatcaatttttctgttataagcactgatggtaaaatgtgcttgttagtcaacagagttgagcacagttggagttttccagttacttgtctggatatttttctgctcatgtcgattttaaactccataaaggggaaggctgtgcttgttacatttaccaacagctgttcctggaatgaagggagacctgtttcacagataatggatgagttaatgaatgacaggctgattgagtgatgagcgggtggatgaaccaataacaggaacactccaggtccgctgtaccctggcagaaatctagagttaactgtgcctgagatgctctgctatgagctcttcaaagggcactcgcttgttgaacaagcgttggaccattcattgtgcaagccagtttgtcagttcatctaggagtttccaattttaaatatcatatgttcttcaaactcaatgagggtaaagtctacattatacaattctaagttattttttaaagttttgggttaggaaccaaaaaggaaagaagagggaatatctttagactttggagtttttttattgaaaatgtatttatataaatttttcttggaagaacaggtagggaaagtcatgactacacagccttataggtgctaatttctggagaaggtgtcatgaaaaataacaaaaatgagaactgtgttctggagggaacattgtgactgtcctgagagcgtgttctgatcccaggaaccaaacccaggagtgtgtttggcaactcagagtgcagcagacaattctttgccccgtgcatttgggataagactggagacagctggaaaagctatggactggacgttctgcactctcaatgcaggactctctgaaatcccacagattaatgtcaggtaaatatattcccactattaagacaactaaagcaagaaccaatgaagaaaagtgagtagaaacagtaagcaattgaaatgtatgaagacaaggaattttgccataaaaagatataaaagttaaagagctatatttaaaggaatacaaaagcgaattgatatgtgaacatgaaaaagaagactgtcagaaataatcaaggaaacattaaaaaataatcaaagagaatacactaacgattaagattatcattgaaaacaaaatggaaatgaagaaaagatgacatgcttcaaaagagattgttacaggaggtcaaagacagatctgaagaagttacctagaatgcagcacagaaaattaaacaggaaacaagaaaaggtaagggataaggaataaaacacttgtgggttctagtgtattagtgtatatataatattttgttggaacttcccatttttcttacacatgattgaagtgtcacaaagagaaagtagagagaatgataggtgataattatgagacattagctgagaattttcaagacgtgtttcaggacctaaatcctctgtttcaacaagttaaatgaatatgaagtagatgaatacatatgttatggtgaaattgcggaacacaaatgacaaagagaagattttaaaagtagcccaaaagataactatctcccagcagaatagactgaaaggaacagtgaaagtcaagaaaggagattaaaaataagcatcaagtcagaattataattctcattcattaaatattgagattgaggtaaatatatttatagatagagaaagaaaaaacacggtgagtttgtcaccaaggtatcctttctgaattatagttaacaaagatgggaagtggtcccagaagaggggcatgaggtgccgctcgtgagggaacccatgtgatgggacagccccattgggcacgtgtgactggggggatggaggaggctggggcatcaatggggatggcacaggggactctgacttgcaggaaagacaatgagctcaccttttggtgctttgtgttggcggagctgttgacacatcctagagaacatgcccagcagacagaggagcggctgtgggatgaggagataaactcagagatgcagcgtgaggcctccgggtccagacagcatgagagcccaaagcgatgatacatgcattgatgttgttaaaaaggattttttttttttttttgagacagattctcgctctgtcgcccaggctggagtacagtggcgcaatctcggctcactgcaagctccgcctcccgggttcaagccattctcctgcctcagcctcccaagtagcttggactagaggcgcccgccacaacgcctggctcattttttgtatttttagaagagacagagtttcaccatattagccaggatggtctcgatctcctgacctcatgatccacctgcctccgcctcccaaagtgctgggctcacgcctgtaatcccagcactttgggagaccaaggtgggcggatcacttgaggtcaggagtttgagaccagccggggcaatgtggtgaaaccccgtctctactaaaaatacaaaaattagcctggtatggtggtgtgagtctgtaatcccagctactcaggaggctgaggcaggagaatcacttgaacttgggaggcagagtttgcagtgagccgagatcacactgctgcactccattctgggcaatggagcaaggctctgtctcaaagaacaaacaagcaaaaagcaaggaactcataaatatttaaaggagtcatttaagtaggtcctaaaataaatcctttgttcctgtcattgcgtggattgagagaggatgtgatgtcactatgggaccttctgtgtgggaacaaggacatccctcctcctctgctcctactcacagtgactctgatctggtaaagctcccatcctgccctgaccctgccatgggcacaaggctcctctgctgggcagccatatgtctcctgggggcaggtgattcctcagatgccaagcagtctcctgtgtgtgtgtgtgtgtgtgtgtgtatgtgtgtgagatgtgtgtgtgagagagagagagagagagctgactatagttgtttttctcattcagttcccaatttctgtctccacagatcacacaggtgctggagtctcccagtccctgagacacaaggtagcaaagaagggaaaggatgtagctctcagatatgatccaatttcaggtcataatgccctttattggtaccgacagagcctggggcagggcctggagtttccaatttacttccaaggcaaggatgcagcagacaaatcggggcttccccgtgatcggttctctgcacagaggtctgagggatccatctccactctgaagttccagcgcacacagcagggggacttggctgtgtatctctgtgccagcagctcagccacagcactactgctccagtgtcagcttggttccctaggaaatggggtttctagaacctgaatgctgacaaataagagttgtatatgtgtataccatgcaacctgcgtttaaaaatgtatgtacatagtgcaatgactaaatctagctagttaacatatgcagtacctcaatccttatcctttccagtggtgagaatacttaaaatgtactctgttagcattttcccagaatacaaaccactgttgctaactctagtcatttgttgtataatagatctttgtaacatcttcgtcttatctgagtgagattttgtatctgttgaccaacatcttcccaacagtccatctctactccagcctttgctaattactgctctagtctttgaatttgaagtaatttccctgaggtctttagctcaacaagatgggggaattttctctataatgatgcttacgttatttttgctttgtttttgtttcgttattttatgtcttgcaatatagtgtttattgtaaatataaataagtatattgtaataaaaatccttcacctctctttgggtaaagctacagttcacatattctaaatttcatgctgtgaccaacgctgacataattatggatcatgggtttctgggagtcctcagagacagccccatacaccaagtttaagatagaatattccagacccagccaggacagaagtgcatggtcctgcatagctccttggaaaattatagttccccaaattcagttattggatattgtggtgccgcagacaccaaacgtctttctctagcaaatgatggtccttggcagggattgttctgaacccattacaattttgccatcatcaaatcactccttgctgttaccttgtgtctcctgggagtgaggacgccccgggcacagatggaaattccctgaccttcggatgctatttcaaggacttcctaagaccttgtgtccatctttttccacctttatccacatgactcctgagacccacgctcacaatagtggaccagctctgattcttaggcttgaacagaattcagaccacagctgtaaacactgttgctgaaaaaagatgtaaaaaaggtgggcagggcttcctacctacactgagggtgaacatacaagggcataaagggaatattttattaatagctaaaaaaagaagaaatacaagccctgctctaatgaaatgagaactgtagcttcacccacagagaggtggaagattttattacaatatacttatttatattcataacaaataatatatttgaaaaaataaagaaaacaaaaagtaatataagcattattataaagaaaatacccctgtcttcttgagttaaagacctcagggaaattaagacacatcaaaagactagagcagtaattaccagaggctggggtggagatggggtgctggggagatgctggtcaaaggatacaaaatttcactcagataggaggaagaagtttaaaaaatcttttatacaacaaagtgactagagttaataacactggactacattctgggaacatgctaacagagttgaattttttagttgaaccaaagcagaatgtccataaaattattttgaatcaaagtctagaagctttcaaaccagttggcatagccttgtgttctgtgatctcagcagcttcagaggacttggcaatcctttctctgcacaaacacccctttgtccactctaagaactagggacacacactcttatcctatcacgaaaacaacaggctgtgctacagttgctggtaactcgttttaagggtgttgagtatggaggattgaacaagattgaaagctatgctcctgagtctgggaatgtgctggaaccagcttgcatgattcagaagagccaaataggcaaacccttcccaaatcctcattgaatgaagccatgatgacagcttgaaatctgccatagtggctatgctgataccataggaactgacaaatgctactaggcatggccccaccctcacagatatccagtttacaaggacatcactggaatgttttctgatacaatgatgatcctattagggcatgtcttatggggccaaaaaggctcagaatccactgtccatctgtttctgctcctagaagccatagtctaagggaatctcaagtgatcctacttctctccaatctccaaattcccttgctctgtgggtctgtgtctcttatgagcatgccaatctgaaacaagacaactatttggaatgtagctaaaggaaacagggaaccagtccattattttcaaattatccttccttgcatgaagtatgcagatgctgcaatcactgaaaacagagatggggcaagcagcagctctgggctgtgagtcactttatactatagtgccccgctattcctctgtggcactgacagaccctgcagcatggactaatttgcataggaaactaagcagcccctgaccatcaggtatgaccctggattcattttgggctgagaggtcagaaggatcatactcaccttaaatattatcctctccaagctgcaatactcccactgtccatcttagtcccaggatgttgtccagagctccagagaatcccttctcttggggcagaatcaccaagcttgctccctccagatttccacagtctccagtgggtatggggcacaggtgccattctgtgtctcaggtagagagaggcatcatgtcaaatgatatttgtagaagagggattcaaattctgaggctcctctccaatatttgacataattttctttgcttcttgtttcattctacaatctcacaatttaggagagtaattcttttgcggttgcattgttgacagcatttgggaaagtttttgtggttaaattaatttaaacaatcattttaatggtgtatttcttctgttcacgatagaacagtgaaagcagtcatttacacatcctgttgatgaaggtgttgtttaaggttcatgatccacacctaactctcaatctagttgaaatgaaaaggtgcagaattaggtggcacgtgagcaagctatgagagaggctcatgccaattactgtgggatttggagggagggagagatgacctctgctctagaccatgctccacgaagaaggagtgggagtttgtccatgggagactgcagaggaataaataccagcagcttctaactggggtggagtgagggctgcgggagcaaatccttggaacagaaaatggtgcatttgagctctcacagaggacagtggaaagaaaagtcatataggccacagtcccccggcaggttctgtttgctaatgatactattttgcaccagtgtgtccttatctcacaccactcctctgcctcttccagaataatctcttccctctccgctgctcagatcagcagatgtgccttgtgcaagttactcatttcacatagcaggccttttgctggtcttaattatatccgtcgttactttccacattagatactgtgtattgccttgcaaatgatcctactttttatattcctatttttcacttgttaatgcatatttgaccccttcttgaaggtcaagatgaccttggaaatataaggctatctcattatctggtcagtcttttactaatctttatttttatcgtaacattgactgtcattttgggggacatgtttgtttatcttgaatttcattgagtttcctcaaagcacgattttgagttctttgtcttaaaggtcgcatatctctgtctgtctagggttggtccctgttttattttttttttgagaaattaccgacttcaccagatgctgtaagctaccgggatagaggaagtttttgtgatttcatagcttgggtcttctttattcagggcagggaattttattttggggtcaagattgttgaaaatggcatagtgaagaaggtagagtcacaggagtttgctttatatacttgaggaagaagaaactgagatttgggaaaagtcaagaaaagagaacctgatcaaagatgactgaaaatagtaatagagcagaaaatgatgaaaagtcgtgttctgtgcaccacgaacgttcttctccccactccaaaagttttcgacacctagaaaatataaagaaaggactgatagcaactggcatcacgttgaggccagtctcagttgggaaaaacaccaaacagccgcttgtctcctgtaagaaccctgaagttggtcctgatgtcttctttctggactctggccctgatcttaactcctcagggaagtcaggtacttcccaaaatacagagaatgtcagattgcccttggttttgaaggagaaaatgctctgtgcttctccccaagataaattctgctttcctaggaatgctttctaacactcgtcatccagatctgattaccttctgtgaccaaacggtttccgaagattttgtaaaactcagcagcctttcacatcctctgcgtttgcactcactgtttccatggcccagaaggacatttattttcccacgacagggccagacactgctcatctgccaaggacgggctccctcccacctgtcttcctcttcacttctcatcccagcattctctggcactctatgatatcactctcttcactccacaggccaaaccaagaatataattggaactgcctgatgtttataacatgaatcaattcaagtccacttacatagacccctggaatacatgaattactatctcctctttacaagagacttctactacatgaaacatactggagagtctttagggataggctcagttttctacacaaattctgcaatatcctaaacaattctgtcttcacagtcataattgatgacttgttctctaaagtacccgaactgtgtttaaagtcagaatttgcaaatgttcttctgagaaaaaagaaaatcattacatcttagtgacatttatccagtctcacaatcttgctgaaaaatatttgtcatcataaccacactttccatgaccacatctttagatatttggtgagactggaaacatcaacaatggtccttctcagaaatcaacttaaaacactgaaagaaaaagtagctgtgctcagtaattgaacctcatcagccttgccaattaaaacacgttgtgtgcatgtgcttgtgagtgtgagtatgttttcttgtggagatgcaaatagtttctgtgggtggcatttactaagcatcactggatcactggtggagttcataggcactttcctaaccccagggagtgatgggaaatgtcacagccactgaatcggcctaagttatagctgatagggttgtttattttaaaattttacaaattcagaaataaatttgtaaactcaaaaaatggggccgggtgcagtggctcatgcctgtaatcctagcactttaggaggctgagggaggtggatcacgaggtcaggagtttgagaccagcctggccaacatggtgaaaccccatctctgccaaaaatacaaaaatttagctaggcgtggtggtgcacccctgtaatcccagctactcgggaggctgtggcaggagaatcacttgaacctgggaggtggaggttgcactgagccgagatcgcaccactgcactccagcctgcgtgatagagcgaagctccgtctcaaaaaaaaaaaaaaagaaaatcaggaaatcctctcttataaaacacatgatgtaaaatttactgatattaatttaaatacaaaataggaaaagattgggcctgattaagcaaagggagccagggaacaatgcagtgtttctgggctaggtgggcttgacatcctcacactgtttaattaagggtctgtgtaattttggctgctctctaagtgcaacaacggtttattttgtaataaaaagattggttcatgtgtccttttgcctcacttggcccagggtgaatttgaagatcaaccctaaattggccttttggggaaagcatagagggtgtgaggatgagggttgcaagggtgggagtggggcatctttgttcctgatttggacaatcttgaactcatcaggtcaggtgtgaatccatgagactgtggaatgttggccacttggtgacgctgtggctccacaatgctgcagggaaccctggagaggggtgggaaggtggccaagagaggagctgaagcctatgcttggctgcctgctggcttcaggggagtggtttgattcagagtggatccagagttaaacacaaactccccactaccagagaagagtagaggtgctggaggcctcagtttgcaccaaagagtagagtgtccctgtgtctgcttgggcagtggatggtgaaggagcttcagccacaagggctgggaatcagtgtcagggcagggacagggcaggtagaggaaagtaaggtgtgatgtgggcatgtggggcctgctctccacccaccaaacctttagtttcagggctgtgcgggacagatgcatggagcagctgagcctgggacctgccaaagcgtgcaaggggcagtggtggcctgcagggagagaaactcgcaaaggccagttcccgcaggaagctccagaaacattcctgcccccactcaggaagtgaccgtgagagacatgctgtcagccagaagggttcaggccctggagagctgataggcttttcccaggcactttctgctgcttctacatgtgatctgctttaatattcacataaattatgcaggataagtattattttacctgtttatgtatctgaaggaaatcagctgtccggggtctcatacttaataactggctgaagactgggtgcagtggctcacacctgtgaccctagcactttgggaggccaaggtgggcaaatctcctgagctcaggagttcgagaccagcctgggaaaatcggtgaaaccctatctctactaaaaatataaaaatttggccaggtgtggtggtgcacacctgtaatcccagctactcaggtggccgatgcaggagaatcgcttgaaccctggaggcagaggttgcagtgagccgagatcatgccattgcactccatcctgagcaacagagtgagactctgtctcaaaataaaacaaaataaaataaaataaaataaaataaaataaaataaaataaaagtctcaagcctgttgtgccaacacctctccttaaccccttctttgtagctctatcctttcacctgctttcccctttacaggtccccatcaacaggttgtgaagttcatgcctcatacgtaatcagtatagtctcttccctgagaagtccaaggaacatgtgacttccaggccaagcatatacattcatccttcattgagacaaaaaaaaaagtgtaattttctggccagccatgatgcttcacagctgtaatcccagcactttgggaggctgaggaggtgaattgtttgagcccaggagttcgagaccagcctgccaacatggagaaaccacgtctctactaaaaataaaataaatcagccaggcatactggtgggtgcctgtaatcccagctactcaggaggctgaggaatgggaattgtttgaactcaggaggtggaggttgcagtgagctgagattgtgccattgcaatccaggctggacaacagagctagactcccgaaagaaggaaagaaagaaagagagagagagaggaaggaaggaaggaaggaaggaaggaaggaaggaagaaaagaaaaagaaaaagaaaaaaaaaggggtggtaattttctgaactgtagacttcctgtaacggatgcaacatatcttgagaaaaaggaacactagtaattgttattcactagttaatttattttattcttttattcaataaacttttttgggggacctactgtgtataagataccctatgtcgtcaaatagaaaatgaaaaagaaaagtatctgcagatgatggcagattttaaaaaataaaaaaagaaaataaataaagaaagaaagaatattttaaaataaaaaatattttttggctatttataacactaaggtctgcatttattttcatttttcaattgttttatgtttattttcaattgttttatgtttagtgtacttagtttttgaatttatatatttcctttcttcttctcattctctctttggtttctccttctctcttctttgccagcttgtatttcttttttatttaaacttttggtaaggacatttaacatgagacctatcctctgaacagatttttaagtgtacaaaacagtatcatagtctacaggcacaaggttgtacagaagatctctaaaacttcctcatcctgcttaactgaaattttatacctgttgacagcaactccgcattttccccaactcccagctcttggaaagaaacattctcatctttgcttccatgagtttgacatggttgcctcatataaacagaaacatgcagtgtttgcgtttctgtgcttgacttgttcacttagaacaatgtcctccaggttcatctatgacacatatggaaggattgtttttcttttctaacccttaataatattccatgtttcagatctgcaggattaaatggatataacatttggctatttctatgaaactctctgtcatgtgagtggcagagtcatttgcagagctgcgagcactgagtttattcaggcacattcacagataaattctgctccatggagaacattcagaaaaaaataataatgccaacttttatttgtcaattcactatatgccaaataaaaatctttcatttgaaaaagttcaattaattagaaattcagctatcagaaaaaaaccttaagatgcaaatgctattctcattttacagatgagggaattggctcataggttaaaaaacttgaccaaattgaagagctattaggatacagtattgggacttcaacctgatctgtccaatttttgcatttataactctgtgctatagtgcatttcatagagagagatgcctaccttcaaaaatcagaatattggatcctacatccctttcagatcaactggctctaacaacatggaaagagatcagtttaccctggagacagtgatgtaaggagagatctctggctagatgccatgacactcagccctgactcccattctaacaccaacttgtaaagacctgaggccattcttgacatgctgcgtttagtttgtgttttgggtttttatttttttctgtaaaatgagatgactactgcccttatgaagagttgtacaaagatttaatatgacaaagtatctagcatatagtagattctagctattttgatttcctttgctaatctcaaacagcctcttccactgtgccaatgagcaaagacaaatatgaacacattctgcccaggaatcttaggttgaggactcagaactcacagaagtggaaatatatatgcttgatgattcatttgatgaaattacctgcagaacatagcgtacatgccttctcagacattttaaaatcagcacaattgatatataaattgtacaatataaacattacacatgttaaataaacagatcaatggttttatatatatatatatatatatatatagacatatatatgggttataaggatatatatgtatatccttataaccactatccctataaaaaggtctctatcacccagaaatctctctcatacccctttgccatgactctctccatctctgacaaccaatgatgtgatttctatcactggagaatacatttttttcaaaaaatctattagtaacattttaaaacctgtattgattaatccttttcaaatacatacatttaagagtgcaaggtgctcctcgaaagttttatggttttaaaagaggctaaatttctgtgagctacctgatccatgttagggacaatcctatctggagataggtaagaggatgaaatagcctcaaaattactttccagctggtggaagctcattctccaaaattatttattcatttttatttatttcttttatcatctacccactcattcaaattatttattttataatggtattgtgacaacaattaatcattttaatggaattattttgagttcccatatcacacatatttaattggccttcaagttcacacactgaatgcaacggcaccaaacaaaccatggtaacagtgactttgttgagagatggtgtcatatgtggaaaagggttctctttgcttttaccgcaagtatccaacccataaaacctgaactttgagctaggaaatctccctttttgttctggccctaccctgggcaccaggctccagcaccatgtctccttctgggttctggcccagagaagttcttggcacagttgtagcacccactcatgggcttgctggatcccagctgtgaatgacagtagcagggccccctttgctctgactttaatttctgtgtccttctcaaataagccctatagatgctgagtggcctgggcccctgccatgtgcttgggctgaaagaaagacagcacgtggggaggtgagcaggagcgaagttgaagcaaatctagaattgacatggaaaggactttggacataaatccctaggcagtggtgagccactggtcctactccaagtgaaacaacatgatgaaactgatattgtgttacagtaacattggtagtagtacggatctgaaaggagatagatttttgggtggcatgaatgattaggagacttctaaatatcctccatgaaagattagaaagggtttatgtaaagcattgtggaagacataggcttgaggctctggattatgttatctcttggaaagagtgttgggttttattctggaagggttaaatgtaggacttgctaggttctatttgagctttgcccttcctcttagggagccccagcctgtggtcatcattgctagtgcatggccttcccagggtcttagtgggaatcacagtgtattcgccacatcactccactgcaactgggtctgaatgccctggctcttctgaaatctctgcccatgtcttcagccttccagaacttgttctctgctcagccttctggtctgccaccctctgcatacacaatttaggatctggctcaggaaaaaaaaaaggggggtttcttacatataatttttgggttcctttttactaccctgtgtcttaaatcccagctgtcttggagtcagttatgtcctatcttcaatcacataaactaacgatatttggtacagacatgtttactgactttacttcacgttaccattccactcttcactcttctttcttgcaattcagacagtcctgaggtcattctccttcttcagatccatctggaattcagatgacttcaactcacctgtcacccaccctatgctttgagacatgtttatgttagctactgacctcagggtagtcaagcctctcattgtcattgttattcaaggtaggttgaatcccactaaaaaacaaaaatccttgaaatttggtttccttattgagagccacacaatgcaatcaaattctttttaattcaatttttttttcttttttggtggaagggccaagaactgtttccttgctgaagcagactcctattataataatttgaatactaacaacattaacctttaaatcaggttgatgttaggttcttatctaagaatgaagtatatccaactgtagcaggttgaaggtctctcatatatgtaacctgttcaggacgagacaattcaaccacttttcttaaattctgatctacatgcctttacattctttgctttaagggccacataaaaatactctgaaacaatttacacatcagaaaaatgctaacactttcctcctggcccagcacatctccaagttaaaaaaatctctaaattatcaacccatagtttaatcatggtaactcccttctacccccaacatagatttttatgtaactgatttgtaactacaaccttaaccgtacaatcacaattgtcattataaaatactaacaaacatgtgctattaacaatggatggttaaaatcacttagggattatgaatcatttcatttttgtgtttatttattatgtcagtttcaacctgatttccctttcccttgttccacacaccttgggttgttctttttcagcatcctgtgtatgttagctctaagcccagccaaggctcatgtccctccacttcagggacagagggtggctcatccctttcgtgctccctcagctccctccccggtgcctggttgctggttggcatcacagccatgcccttgaaagatgggcgctggtccacactgcatccgtggtcatgtagccaccctccctccacagaaccgagcaaaaagggctccaccgcgcttaggcattgagggaatggacattttgaatggtgctgtcttgtgtgatccctcagaggagaaggagatttcttgaatgggagtggtctgttgctgagagggatcctgaaagacacggggacagagacaggggtaggatccacataatgaggaagcagctgagaacaaaggagcccctgccagaggaatatccttggggggtaaaaagctggctctgccctttctccccagcccattcatcccagcccagacaattcaaatctgccttctatcaggacctagaaaggatgtaaaacggccgggtataaatatcccctgggtctggggaaactgtcaggagcagtgacatcacaggaaaaaccaccaaccaaggccaaggagaccagagcccagcacctcacccagaggaccccagtcagaggccccatctcagacccgaggctagcatgggctgcaggctgctctgctgtgcggttctctgtctcctgggagcgggtgagttgggttcacatcagctgtccttgaattcgaaactttttccttgtgatttcagcaacaagcctcctcctgggctctgcctgaattttgtccctttccccccgcagtccccatggaaacgggagttacgcagacaccaagacacctggtcatgggaatgacaaataagaagtctttgaaatgtgaacaacatctggggcataacgctatgtattggtacaagcaaagtgctaagaagccactggagctcatgtttgtctacaactttaaagaacagactgaaaacaacagtgtgccaagtcgcttctcacctgaatgccccaacagctctcacttattccttcacctacacaccctgcagccagaagactcggccctgtatctctgtgccagcagccaagacacagccttgcagagtcaccgctttcctgtgtagaaaccttaggggccctccaggaagctttgggggccaccaaagccttcgatgaacatttcctacaagagccccgacagaagattcagaacatcatagcacctttaatggcataaaatatctagcatatagtagaagcctagctattttgatttcctttgctgatctcagacaacctcttccaccacaccaatgtgcaaagacagatatggacacattctgccaagaaatcttaggttgaggactcagaagtcacagaaatggaaatatatatgcctgataattcatctgataaaattaactagaggatgtagcatacatatctcctcaggcatttaaaaatcaacattattgatctttaaagtatatgaagttaacaggacaccttttaaatgaacatatctgtgatttttgagcaacatatatctatatatgcaaccccacctctatgaagatgtatctgcatcacccagaaagtccctcactcccctctgcaatgcctctgtctgtcccagcaaccaatgatgtgacttctatcactggagagtcgttttgttggcaaatatttttaatgcaaatgtcaaacctcttctgaataatcctcttgaatacatagctaaatcatcaaggcagggaggagttcctggaggttttatggttttagaagtggttgaagccaggtgagctacctgacccatggtagggacaattctatctggagatggatattgtgccaaaataacctcaaaaggtcttttcggctggtagaagctgattctacaaaatttattcattttcattcgtttattttctcgtcaattcattcaatcaaacaattttatgttacgttttgacaaaagttaatcatctttaaggaaattattttgagttcccatcagacacacaagcagctgggctttgtgttcacacagtgagcatgctggggtcaagcaaaccatgatcacagtgacttcattgacagatgatgtcttattgggagaagggttctctttgacttgaccccatgtgtccaacccataaaacctgagccttaggctaaaatccatcttccttttctcaccctgccttgggcaccaggccactgtgctgtgtgtttctctgtctcctgaagcagagtcctgggcgcagatttggaacctattcgtgggcttgtttgatcccagctgtgactttcagtaccagggggtcctttgctgtgacttgaatttgtgttttctttactcttaagttccacagatgctgagtgacccagaccctggtcatgctcttgtgctgaaaggaaaccagcacatggggaggtgagcagtatatgaaacaaaatcatgtatttacaaccagtggcaagacttactggcaggtgctttgttcaaacactgttaggaatttgaagatcatggcagtagaatgtgaaaccaagtgcagggtccttccaaatgcaggcctctgtgcaccaaagatagacttttggagctcattttttttaaacaaaaacggaaacaacactctatgttcatggctgtaggccatgcgagaatatttttttaaattttaatttaatttttatttttccatatattattggggtacaggtggtatttggttatatgagtaagtttttagtgatgacttgcaagactttggtgaacccaccagctgagcagtatacactgcaccatatttgtagtctgttatccctcaccccctcctgctgtttccccaacacttccccaaagtccgttgtatcattcttatgcctttgtgacctcatagcttcgctcccaaatatcggtgagaacatgctatgtttggttttacatttctgagttacttcacttagaataatagtctcccatctcatccaggtagatcattccaaatgctgtttattcattcctttttatggctgtgtagtatttcatcatacatatatgatatatatatgatatatatgatatatatgtgatatatatgatatatatcatatatatgatatgtatatgatatatatcatatatatgatatatagatgatatatatatcatatatatgatatatagatgatatatagatgatatatatatcatatatatgacatatatatgatatatatatatcacagtttctttatccactcgttgattgatgggcatttgggttggttcctttttctttatcactaaattaatggcagcaataaatccagaacattcctcattaccctaaagtcagccctgtctcccaaactcccttacacatcaggacacctttgtgcccatagatcatgggcagtgcttggcagccaccactgtccacacagagagggtagtcagtagcgttaggtggttctgcttgctggggtctcaccccaggcacagaaagcaggagccctgggtggagctgaaagtgctcatctgggtttgtcaggagtcccatctgtcagtgaattcacaagaaacagaacaaaacaactccttcaatgttgatgagactgcccctgggatttggaaagctaataacagagaaaaccaatatagacaaaggattttaaacaggactatcggattatgatcaattaagcaaattagaaaaggatacttgaaggagtatttgggacacaggaatcaaaaacaccaggaagacatgaggagtttttccaagattgtagactatagcaatacttagataaccaataccagtgtattaatgagtaattattagtattattattttgagatggagtcgcactctgtcatcaaggctagaatgcagtggcatgatctcggcttactgcaacctccgcctccctggttcaagaattctggtgcctccgtctcccgagtagctgggactataggtgcacgtcaggatgcctggataatttctatatttttagtacaggtgggatttcaccatgttggtcaggctggtctccaactcctggcctgaagtgatctgctctcttcagcctcccaaagggctaggattacaggcatgggccactatgcacagccaagtaatttgtatcatcatgggaataaaaaatatacattgagttacaaactaattaccaaaagatatttaaaaaatggtagacttgcatcgattcagacaaaggcattcttcccatccaaactgttcactggtgcattgatcttgaatttgaccatctggggaaggggcgtggcctctcctgacagcaaggctctggggcccaggcagggagaatgaggtctcagaatgacgcccttgaaagacgtgttcccttttcaccaatgcacagacccagaggacccctccatcctgcagttcctgccatgagcctcgggctcctgtgctgtggggccttttctctcctgtgggcaggtgggtcctgggcggggccccttgtgtggatttcaaggcccatcccctttccactggagcagtagcatcagctttgtccttctctgcaggtccagtgaatgctggtgtcactcagaccccaaaattccgggtcctgaagacaggacagagcatgacactgctgtgtgcccaggatatgaaccatgaatacatgtactggtatcgacaagacccaggcatggggctgaggctgattcattactcagttggtgagggtacaactgccaaaggagaggtccctgatggctacaatgtctccagattaaaaaaacagaatttcctgctggggttggagtcggctgctccctcccaaacatctgtgtacttctgtgccagcagttactccacagtgctgcacggctgtctcctctctgcacagaaaggcaagggaaggtgctgccctcctccgcagcacagattcagcgatgcccttggtcctagcaccgaaaactttggagccccaatgggcccgggcggtgcgagccttcatctgtgccaggtgcctctgcagtcggtctcggccaggcctggatcggtcccaggacctcagatgtcttccttgttgccctccggtctttcctctgaggtgtccttttgggctagtgccaggggtttcccagctctgactttcctagtcattcacctgagtctgaggcctcctaggtgaaataggatttgtatttcagatccatctagactcccgtctctacctgggtaccacgtgctttcctctctctatgatttttcctcatgttgaaccctacggtggtctcagctgcagcctgcatttcctatattcacagtcgccctccaaggccttgctgggtttctcctccccgacctccctgcccttctctactccagccatgttgagagactccaaagtccatttcctgtgccctgggctggagccttcctttctgtagtggtcaacacctacctgtgcttcagatctcagcatcatcagccctagtgataatcaccattatgcttcccttggctcccagctgaggtcagtttccctctcataatctctcatggtatcatgtgtctgttaatcagtagaatttagcacagttggaatcttccaagtactttaaaccccatgaaggccaaggctatgcctgggttataaatcagcagctgagcctggcacaaggggagatgcatttcagagaatggatgagtcagtgatggagtgagtgatgagtggatggatgaatccataacaggagcaccctagatccattttacccttgcggagatctggctgtaagtacaagaactcttacccttttgattgctgggctacgggaggtccttgaaattaatggggagtcgctatcatgggcggccccaccttggtcaaagattcctcctgagtctgcagcaccagacctcctccaggtctctgtgctctccttcagactctttcccacaacaactctacacagatcagagatccctttccagaaacccatgcatagagttgtgttattttggaaccacttctggtaccaaaaactccattaggtttacatcaataaaacagaatcactaaaagtactatggagaggaggatttatgacaggagttagaccttatataaatgtagggggagctgaggaagagaaggtctggaggggagatatagctaggcagatttaattcatgattaatgtgaccgtgacctcttattctactcaaaggagagcatatgatttcaacaaaaaaatattgattttcctttgtaaaagtttgatccaaatagtgagctatttttgtcccataattgtcttaagttggctaatggtggaacaaatccgactttgatttccttgaaagaacaggaaaaaaaccgtcattcatatacagtcttacaggctctattttatggaggaagcataataaataggaaagagaaaatcagaattctcttctggaacctacattgggactgtcctcagagcaggttgtgatgtgaggaatcaaatctacaggggtatttcgcagcttggagcgcagcagactgttcccgaccccatgcatttgggggtgagaccagagacagttgaaaaactatggaatcttgacattctgcactctcaagcctggcctctccctgaatttcacagattaacatcagaccaatttattccgactattaaaagtattagaacaaaaaccaaggaggaccagtgagcagaagcaataaaccattaaaatggacatcctaaagatttaaaattttgccatcataagatgtgaacgtttgaagagctgcatttaaatgaatacaagaagggactgaaacaagaatacacacaaaaaagagacggcccgaaaccatcaaaaaacattaaagaaataatcaaatagaatgtctagaaatcattacgattactccacaaaacaaaatggaagctaaacagcagattcaatgcttctaaagagattgttagcaatatcaaaggaggatctcaagaaatcacctagaatgcagcacagaaaattaaatgtaaaatataaaaaaagtgaaggaacaaggaaaaaatgaagtttctagaatattagaaagcatataatgttttattgaaacttttcttactttcttgtatataactgacgtttcagaaagagaaaataaggcaaatgatctgaggtgattgtgtatgtgatgctagctgagaatgttcctgagatgtttgaggaccgaaatcctcgttcaagaattcagatgaattgcaagacaagtaggcaggtccctgtgaaactgcagaccataaatgacaaagagaagattttaacagcagtcaaaagggaaagataaataacttccagtggaatagaatgaaagaaataatcaaagtcaagaaagaggattaaaaataaccattcaataagaattgtagtcctcatttattgaagattgagattgatttaaaaaaatctataggacaggaaagaaaatatggaaaaccaaaagaattctgtgagtttgccaccaaggtatgttttctgaattatagttaacatgggtgggaaatgatcccagaagaaaggcatgagggcagtttgtgggggaacccatgtgatgggacaatcccattgggcacgtgtgagtgtgggaatggaggaggctggggcatgaatgggtatggcagagggcaccctgacttgcaggaaagacaatgagctcactccttggtgcctggtgttgggggcactgttggtgcatcctacagtacgtacccagcagacagaggagcgtctctgggatgagaaggtgaacttggagatgcagtgaggcctctgggtccagacagcataggtcaaaaaaagagaacctgatcaaagatgactgaaaatagaaatagagcaaaaaatgatatatgtgcctgatgattcatttgatgaaattaactagagaacatagtgtacatgcctccacagacattttaaaatcagcattatttatctataaattatacaatataaacattacacatgttaaataaacaaatcagtgagctatatatatatatatatatatatatatatatatatatatagagagagagagagagagagagagagacatatatatatgggttataaggttatatatgtatatccttataaccactatccctatacaaatgtctctatcacccagaaagttctctcacaccccttggcaatgactgtttccatctctgacaaccaaatgatatgatttctatcactggagaatacatttttctcaaaaaatctattagtaacattttaaaacctgtatcgactaatccttttttaatacatacatttaagagtgcaaggtggtcctggaaagttttatggtttaaaagtaaagttctgtgagctacctgatccatgttagggacaatcctatctggagatagataagatgatgaaatagcctccaaattactctccagctggtggaagctcattctccaaaattatttattcatttttattgatttctttactcatttactcactcattcaaattatttattttataatgatattgtgacaacaattcatcattttaatgaaattattttgagttcccatctgacacatacttaactggccttcaggttcacacactgaatgcaatgggactaaacaaaccatggtaatagtgactttgttaagagatgatgtcacatgtggaaaagggttctatttgcttttaccccaagtatccaacccataaaacctgagctttgagctagaaaatctccctttttgttctggccctaccctgggcaccaggctcctgcaccatgtctccttctgggttctggcccagagaagttcttggcacagttgtagcacccactcatgggcttgctggatcccagctgtgagtgacagtagcaggcccccctttgctctgactttaatttctgtgtccttctcaaataagccctatagatgctgagtggcctggacccctgccatgtgcttgggctgaaagaaaaacagcacctggggaggtgagcgggagcaaagttgaaggaaatctagaattgacagtggaaggaggagatgaggaatatcaattatggcattaagtaccagtgatagtagcaggactgtatcttatttccttaaacctctgatacttgtacagatagcagctgaccacaaccttgaagacctatttggactcaatggaaataatgcatgagtggactgtatcagttgcctctattaccacctcatactctcttggttccacctttgattccagccacagctatgatgaacagttctatgcagacactgacctgctccacagttaccgcacctcaccttcaatgtggccacgtgttcccaaaacacgctgttgctgaggcatgagacacattggtggtctgcatggcgcttgttcatgcacaatgaagtgtgagtgagttaatgtcctatggggcaattctcaaccactggagaatgagaactggtggataaaagccttggcattagtctcaggctcctagaaaggcctagtttgatagccagccacctatctatagagatggcccgattaatatgttttcctttgtattttctctgctttttgtttctctgattcagtatggatattttcacctgacctatcttccagtttatctagtcttttcagctttatctatccttctttaaaatatatatatatatatttttttttcctaaattttatgtatttcatatatttcagttctggaatttccacttcaatcttgactacagtattcagttgtctgctaaaattctccattttgtcatttcctttttgattatattaacatcagttattttaaaggcagtgtctgataacacatctctgttggtgtctatttcttttgtccgctttcttttttttaatttttggtcatgcaatgttgttttctcacacaatcaacaattcatttgaatgctaggtattgcatataaaaattacagagataatgaggctctgaatgatttcatcttcctcagaaaggattcatgtttgcttctgctggaaattgtagcagagacaggtcaccttaattgagttgatgactgagctggatcagagctgggattcagccttcctgatggcttctcaactttgctattagccattaaacttccaactagatttctggagtattttaccagcttattaaagtgtaaattacataacataatatttgcctactggaagtgtgtaatttaatgagttttgataaatttgtggagttgtgcaacaatcaccatgatctagctctaaaatatttcatcctccctacccagaaagttccttcgtgctcattttcagtcaatctctgcttctacccccagcaccaaggcctggggtctttgccaggctcctctcctactcagtagtcactgaacgtaaatgttctccaggccagaaaggtggtggatgctcctcaaagcctttggcccatcagtcctccctttcttcttagcttctcagccatcaaatgaaattgacaaatgaatttaagggaaaagtaggtttttttttttttttagatttatccgttttctatgatatccctatcttttacgctcttactgccccagtagctccaagtgccttcaaacatttatgttttatattttgttaagcttttctagttgtttttggtggaagtgttgttctgccactatccagtctattaactctgaaagtcagtttttatatttattaaagatgaagtgcaattgagttggtaggtttgtatgtttgtattatggtggaaacttcctgaagagagtgaggagtgaagcccctctagtctcccgtcacgtgtccctaataagacctctaccaccctgctgcctttgttccactactggactgagccttgacacgtttgaccctttggccacaaggaggagctgtgactctgctgagattcagagaacttggaggaaggagagacaattctctggatggcagagggttaatagaaagattgagtttatttacaacaagggaaaatgtggtctgcaaagaatgctagtcaaggctctaagtgtgagggttaaatacagactattcattttgctttgatatgcaggcgcttttgtgctatggaagagcctggactgtcagacttccactggagcgtgcatgggattagaaaggacaaggcatgagctggggagagtgggagcccacaagcagacacagatggaggaccccttcccaagaggaataagagaggctctgggtgctgggccgttgctccagctcagcccagtacagctgagccctgccatgaagtgagtctggccggccaggggtcccttggggatcttgcagagaataataactcagggaaatcttcttatgagaccaaaggtgacctacagccctgttctcctcactctaaattatcggggaattaagctagaaagaagttttttcttgttcctcttctggatggtcctctgagtttttggagcaggagctccccacagtgataggaaacccctctcctaggcctgagcaaatgtttctatcaaaacagcatcaccagactcccttccagcttccatttccaagttctttccctatctacgaagaaccgtggaagctagacttgtccagacgtcaaaggatctgatgatgccaaaacacctggagataggaaagaaggtggcattgacagactgccaggatgcacacctgaaacgcactttgttttcactacaggctcgtgtttcacattttaaaaaagcatttggaacttccctgacttcttggaaatccaaaaatacaacaaagttacattttagtagactctagtcagtcatctggcaggaaaaagcttcaggatataaataaaagtataaatagtagtatatacatatatatactaattatttatatataaccttacatgtatatatactacatacatgtatgattatgtatacatatactatacataatatagtgtatacgatacatgtactatatacaatatatactatattatatatattctgtattacatatagtatatgtatatgcatgtattaccatatatgtatatatacatgtatgtatacgcatatattactatatatgtatatatacatgtatgtatatgcatacattaccatatatgtatatatacatgtatgtatatatgtaggctggatgactagagcctacatcaaatgtaactttgttgtattcttgaatttccaagaatcaagggaaatttgaaacgtatatatccaagtatgtagtgtgtgtgtatatatatatatacatacatgtatggtaatgtatatacatgtatataatatatactacatgtaatatacatgcatatattatatatacatgtatatatatacatgtgtatattatatatacatgtatatatatacatgtgtatattatatatactacgtgtaatatacatttatatatacatgtatttatatataccactaccaaatacatgtgtatatatatactaccatacatgtgtatatatatacactatttttatatataatatatactacgatacatgttctagcatattgcctgaagtaaaagtccagccaaatagtttaaaaggaaaaccatgagccttcctgtgaagattaattttgcatttcatcttgaaatggaacaaagaaatctactgaagatagtcaattcacttctatatacggaagtctacatttatcagctttctacagtatgagcgactttcaaatctcctaaaagttacacaaatcagaatatgcagaacacacatttctaagctcaatattaaatatgtaaagtgactaacttgaacgtaagagttggacgttcagggtcctcctgtgatttcttcattcccaccatcacaaaacatctacaccttcttctcagtaacaaaaatgagatgacataaaatcatttttcatagttaataaataatacctatgcatcatgacattgcattgattttttgttaatggttgttttcaaatgactataaattaaacatttataatctatacaatagaaataataaatgtaaatattttaagtggatacatgagattttagtagccaaacaggctcacacctgtaattccagcactttgggaggccaaagtgggaggatcacttgggcccaggagttcaagaccagcctgggcaatatagggagatcctgtctctgtattttaaaaaatagttatacagaaaagtaacatgaaatagtctgcaacaggatgtcctatctgggtttgatctgaatttccatttagaaaacagacaggcactggtccatctgcgggcataggttctcatgaattgatgtgcatgttgacttttgtattttgtcaaagttaaaggagatattttgatcagagtcagagccacaagtaactagcaggaaactgagtgggatggaggttatgccatggtccttgcttccttgcagagctaagaaaccagttgtgagcaccagcgaaaagagacaaagtcagatgaaactgaaatcttcatgggactctgtgcccaagaaaaccagcttgacaggattgggcacaagagctattccttccatcctacgctgccagagcacacagcacagtttcccccatgagctcttggggagctggaggagggagatagctgtgctgggcggagtcgtattcccatgggaagtccaaaaagtagaggcagggatggaggttttccttctagaaagagtggaagattttgtttacaaacgtacccatacacatgcctttctcccgaagacccaaactttggggaattgcttaaatataacaaggaggttaaatattggacagccaaaaataggaccgaagccaatctcttctgaagtaggtgtagtcactgtgcattagtcagatattcaaatgagcaaagattcaagaggaaaaaaaaaagcattattggaaaaggaagcaaaagatcaagagaagaaaaccagcctgactctgagaggagagcccaaaagggagaggaagggaggaggtcctcagatcccgggtagggagcagggagggaggggtacaggcacaggaatgactgtcagagacacatcctggaggccacaagtccactctctcaactattcccagaaattccaaaaactcctttaaagaagccagtgcagggcatgaaagggaggagccatgctagaggagatcctgggaatgggggaatgattacaggctgtgacctcaatggcacagcacctctcagaggcagtggaaaccacagcctagtcttctcaccactgcagaccagaatcctgccctgggccttgcctggtctgcctgactcggccatgggctgcaggctcctctgctatgtggccctctgcctcctgcaagcaggtgagtcctgggcccaagtgacaagatcctgttggagtccccgagccttttcaccatgacaacaacaggaggctacctcctgggatttgcctgaattctgcttctttcctttacagatccactggacacagccgtttcccagactccaaaatacctggtcacacagatgggaaaaaaggagtctcttaaatgagaacaaaatctgggccataatgctatgtattggtataaacaggactctaagaaatttctgaagacaatgtttatctacagtaacaaggagccaattttaaatgaaacagttccaaatcgcttctcacctgactctccagacaaagctcatttaaatcttcacatcaattccctggagcttggtgactctgctgtgtatttctgtgccagcagccaagacacagccttacagagccactgcatccctgtgcacaaacctcccggctcagccaggaagctgtgggccgtgtgtgcacctgcacccaaggctccagtctccattccctgatggcctctgatggagtttcagtctgtagtacagcctctgccagtgcacctgatgtggcaattctccattttatgtacacagaactctcagaattctgtttatcagctaaagcaggggttcacaacaaagtcagcaaagtatcagagctcaactaacaaaacaggagcctgtcccatgcactgaaggtctttactgatgggagaagccatttcttgtctttgtctgctgcacatatgggtccatattttactaatgttatgattataaacacactgtaggcaaaaatggttgatgagcctaagcataaagaagaggggaaggaaagtatttctaagatcaagagacaatttggattatcagtgagtattttgtttgacagagaaatattttgagaggcgtgaaattccatggcaataggtaaactggaaagtgttgaggagaagtcagtggaggcagccttgtgcattgtcggctccttctcttcaagaagggtgaccagcaagagtttctcccaattctgatgagtgtcatcttgaactctcctcaagagcaggtgacagctggatgacaggggatattgggagacatggaaaggaatttggacacaaatccctaggcagtggtgagccactggtcctactccaagtgaaacaacatgatgaaactgatattttggtacaggaacactggtagtagtatggatcagaaaagagatagatttttgggtggcatgaatgattaggagacttctaaataccctccatgaaagactagaaatcgtttatgtaaagcattgtggacgacataggcttgaggctctggattatgttatctcttggaaagagtgttgggttttattctgggacggttgaatgtaggacttgctaagttctatttcagctttgcccttcctcttagggagccccagcctgtggtcatcattgctagtgcatggccttcccagggtcttagtgggaatcacagtgtattcgccacatcactccactgcaactgggtctgaatgccctggctcttctgaaatctctgcccatgtcttcagccttccagaacttgttctctgctcagccttctggtctcccacccttctgcatacacaatttaggatctgactcaggaaaaaaaagggggttttcttacatataatttttgggttcctttttagtactctgtgtcctaaatcccacgtgtcttggagtcagttatgtcctatcttcagtcacatatactactgctatttggtacagacatgtttacttgactttacttcacgtttgccattccactcttcactcttctttcttgcaattcagacagtcctgaggtcattttccttcttcagatccatcccatattcagatgacttaaaatcacctgtcacccatgctgtgctttgagaaatgtttatgttagctactgacatcagggcagtcaagcctctcattgtcattgttattcaaggtaggttgaattccattaaaaaataaaaatccttgaaatttggtttacttattgggaaccacacaatgatatcaaattctttttaattcaattttttttcttttgtggtggaagggccaagaattgtttccttgctgaagcagactcctatcataataatttgaatactaacaacgttattttaatactaacaacgttaacctttaaatcagattgatgttaggttcttatctaagaatgaaatatatccaaccgtagcaggttgaaggtctctcatatatgtaacctgttcaggacgagataattcaaccactttccttaaactctgatctaaatgcctttacattctttgttttaagggccacataaaaatactctgaaacaatttacacatcagaaaaatgctaatactttcctcctggcccagcacatctccaagttaaaaaaatctctaaattctcaacccatagtttaatcatggtaactcccttctacccccaacatagatttttatgtaactgatttgtaactacaaccctaaccctacaatcacaattgtcattacaaaatactaacaaacatgtgctattaccaatagatggttaaaatcacttagggattatgaatcatgtcattcttgtatttatttgtacttattctttgtgtttatttattatgtcagcttcaagctgatttccctttcccttgctccccacaccttttgttgttccttttcagcatcctgtgtatgttagctctaagcccagccaagccccatgccctccacttcagggacagagggtggctcatccctttcgtgctccctcagctccctccccagtgcctggtggctggttggcatcacagccatgcccttgaataatgggcgctggtccacactgcttctgtggtcatgcagtcatcctccctccacagagctgggccaaaaagggctccactgcccttaggcattgagggaatggacattctgagtggcactgtcttgtgtgatcccacaggacagaaggagattccatcaatgggagtagtctgttgctgagagggatcctgaaagatagggggacagagacacactgggaggatccacataaagaggaagcagctgagaacaaaggagcccctgccagaggaatatccttggggagtaaaaagctgactctgccctttctccccagcccattcatcccagcccagacaattcaaatctaccttctatcaggacctagaaaggatgtaaaacggctgggtataaatatcccctgggtctggggaaactgtcaggagcagtgacatcacaggaaaaaccaccaaccaaggccaaggagaccagagcccagcacctcacccagaggaccccagtcagaggccccatctcagacccgaggctagcatgggctgcaggctgctctgctgtgcggttctctgtctcctgggagcgggtgagttgggttcacatcagctgtccttgaattccaagctttttccttgtgatttcagcaacaagcctcctcctgggctctgcctgaattttgtccctttccccccacagtccccatggaaacgggagttacgcagacaccaagacacctggtcatgggaatgacaaataagaagtctttgaaatgtgaacaacatctgggtcataacgctatgtattggtacaagcaaagtgctaagaagccactggagctcatgtttgtctacagtcttgaagaacgggttgaaaacaacagtgtgccaagtcgcttctcacctgaatgccccaacagctctcacttattccttcacctacacaccctgcagccagaagactcggccctgtatctctgcgccagcagccaagacacagccttgcagagtcaccgctttcctgtgcagaaaccttaggggccctccaggaagctgtgggggccaccaaagccttcggtgaacatttcctgcaagagccccgacagaagattcagaacatcatagcacctgctcattcatccatgtggcaacgttacatcctatgctcatatttagagtgtgggttttctttagcgtgtgactctgccctgttaactgatttgaaaaatgataaacacattcagatctagtctttttaaaatccctttttaaattgtaaaataaagcaagcatgctataaggggattgtttggtttaagatgttataagaccctctcaacaaccacctgcgtcactacagagtcataccctgcactggaccacagagtgtcctgtgaggagccaagttcttctgacactttatgcctggtggtctccatgcctctctttctcagtaaccaggggtccattctgtcataggttgctgacacccaaggtcaagcagcactgggtttgggggaatcatagaggcaacttccaggcaagggtcccagggcgggagccagctggagagaacagtagacaactgagcttttggggaatgggtttgagaaatatctgtcaacccaattctattattctatcttccatcttgtctcttctctattgttcttatttaaactccaagctagagcgtaaattccagccctgatcaaagctccatatccctcacagacaccttctctgaaccccgcaggcagcaaatgtgcctctgtccactcccatttgtgtgggcggtaagccacccaagtcctgaggcaagagaccgagggcacgagctgttccagtataataaagaaaatatataaaataagaatagttatactagtaatagattatagatatgatggtatacaaatattatgaataatcagtttgtagcattactcttcattccaatattataataatccttgctctacaattataacctaggaaaaaccaggccatacagagataggagctgaaggggcacggtgagaagtgatcagaagacaagagtgtgagccctctgtcatgcccagacagggcccctagagggctccttggccttgtggtaaccccagagcctgggaggaagccccttgcctagaggaccttggtctagccttagcgtcagtgcctagaaaaagcacccattacttagccgaccaggaaagggagtctccctttccccgggggagttagagaagatattgcgtgtggctaggcttggtgctcacgcctgtaatcccaacactttggaaggctgaggtgggtggatcacgaggtcaggaggtcaagacgagtctggccaacatagtgaaaccctatctctactaaaaatacaaacaattagcgggttgtggtggtgtgtgcctgtaatcccagctacttgggaggctgaggcaggagaatcacgtgaacccgggaggcagaggttgctgtgagctgagatcttgtcattgcactccagtctgggtgacagcgtgagactccacctcaggaaaaaaaaaaaaaaaaacgataccgtatgtgtgaatgtgtgtgtgcctatgtgtgtgagtgcgtgcatgtgtgtgcatggatgtgtgtgtgcatgtgcatgtgtgtggatggtgtggatgtgtgtgtgtgtgtgtacgtgtacatgtgtgtgtgttcttgtggaaactcacccacatggacccaggttctctgggtggcattactgagaggtgctgggtcactggtagagctcataggcagttctggggagtgacaggaaatgtcacagccaattgaatctgcctaagttacagctgatagggttgtttatttcaagattttgtaagttcagaaatagatttataaaaaatccaagaattttctttctaaaatgcactacctaaaacttgctgataattcatttaaatacaaaatatgagaacatgggtctgattaatcaaaaggaacgattgaatacagtttccaggatagggctgtttgatatcttcacactgtttaaatctgtggcctgtatttttcaggctcctctcgtccatcctagcatactaattgcaatgctgtaacattgtttattttgcaatcaaaatgttggttaatgcttgcttttgctagctaaaggtgaactttcagatcaaccctatattggcccttctgggcaagtatacagagggtgtgtgtgagagggtggggattgcaggagtgagggcagggcatctctcttccttctctggacaatcttgagttcatcaggccaggtgtgaatccgtgagactgtggatctttggccacttggaggcgctgtagctccacgatgctgtaagaaaccctgggcagggctggagagtggccaggagaagagggttgaaggggatgcctggctgcctgctgccatcaggggccctttgggattccctgagtgggcctggacatgtggaattaagcacagacccctcactgccaaagaagggtagggatgctagagtcctcagtttgtaccaaggagggagggtgtctgcctctgcgtgggcagtggagggtgaaggggctggggtggcaagggctgggaataagtgtcaggcctgggacagggaggacacaggaaaggcaggtgtgatggggcatgtgggggctgtgctccacccgctccacctttagtttcagggctgtgtaagacaggaagatctcatggagtagcaaagcctgggccctgccaatggttgcagagtgcaggggtggccggcagagggagtaactgggaaaggccagttccccaaggaaatgccagaaactttcctgccccattcagaaagtgactgtgaggcgggtgcttccagccagaggggctcaggccctgctgagctgacagcgttttctttcccagacattctctgctgcttctatatgtgatctgttttaatgctcactgaaatcacaagtatttattattttgactgtttttgtatctgagggaaggcagctgtccctggtctcatatttaataactggctgtcgtgtgctctccaacacctctccaccctccctactcagtacatctgtcccgtcatctggcttcctctctccaggtcccattagcaggaggggaaggtcatgcctcctatgtgaccattagaacctcttccttgacaagtccaagaaacacgtgacttccgggccaagcatatccattcattcttcattgcagccaaaagaaagatgaaattttctaccctgtagactttctgtcactaatgcaatgtaccttgaggaaaagtaacatgaataactgttattcattagttaatttcttttatatcctttattcaataaagtctttgagaccctttctttgtatattttatgacataaaataaaaaatgggaaaaattgtttaataacaaatatttcttactttttagagtattaaggcttaaatttattttgttttattttagttttatattcaaagtactttactcagtttctgaattacaaaaatttccctttctttctctgtctctctttagctacctccctcattttttttgccagcattttaatttaatgtggtaggaacatgtaacatgagatctgtattttaaatagatttttaagtgtacaatacagtattgtaatctacaggtacaaggttgtacagaagctctctagctcttacttatcttgctgaactgaaattttatacctgctgacagcaactccccattttctccattcccagcccatggatatcaccatttttatctttgctttcatgagtttggcttttaggtagcctgctataagcagaatcagggagtatttgtctttctgtgccaggcttagtcacttatcacagtgtcctgcagctttatccatgttgtcacgagtgacggggttttcttctttttaatgcttaataatataccattgtatgaatataccacatttatggactttgactgtttctatgaaactgtctgtcacataagtgggagagtcatttgcagaactgaaagcttggattacatgaatgggcattcacatttcaattctactccatgggcaagacggagaataaaataatgattccatcatttactcttactttgctatacacaaaatagaagtcctgcttttgggaagtttcagttatttagaaattcgactgtcagaagaaaaccctaagacacaaatgcttttctcattgtacacgtgagagaattggctcattggttaaataacctgaccaaattaaatagctattaggatgcagtactgatcctccaaccctgcccagtctaagttccatgtttatagctctatgctataaaatatttcataaagctgccaacctagaaaacattggaaagttttcccctacatcccctttaggcctgctggctctaatagcatcatagtcagagatcagtttaccctggagatggtggagtagggaaagaagtctgaagaggcaccatgactccccgccctgactcccactctaacaccagctcatcaagacctgaggccagttcttaacgggttaacttaagtttttcagtttttttttacctataaaatgagactactactgtccatcagcagagttctagataacctttaatggcataaaatatctagcatatagtagaagcctagctattttgatttcctttgctgatctcagacaacctcgtccaccacaccaatgtgcaaagacagatatggacacattctgccaagaaatcttaggttgagggctcagaagtcacagaaatggaaatatatatgcctgataattcatctgataaaattaactagaggatgtagcatacatatctcctcaggcatttaaaaatcaacattattgatctataaagtatatgaagttaacaggacaccttttaaatgaacatatctgtgatttttgagcaacatatatctatatatgcaaccccacctctatgaagatgtatctgcatcacccagaaagtccctcactcccctctgcaatgcctctgtctgtcccagcaaccaatgatgtgacttctatcactggagagtcgttttgttggcaaatatttttaatgcaaatgtcaaacctcttctgaatagtcctgttgaatacatagctaaatcatcaaggcagggaggagttcctgggaggttttatggttttagaagtggttgaagctaggtgagctacctgacccatggtagggacaattctatctggagatggatgttgtgccgaaataacctcaaaaggtcttttcggctggtagaagctgattctacaaaatttattcattttcattcgtttattttctcgtcaattcattcaatcaaacaattttatgttacgttttgacaaaagttaatcatctttaaggaaattattttgagttcccatcagacacacatgcagctgggctttgtgttcacacagtgagcatgctggggtcaagcaaaccatgatcacagtgacttcattgacagatgatgtcttattgggagaagggttctctttgacttgaccccatgtgtccaacccataaaacctgagccttaggctaaaatccatcttccttttcttaccctgccttgggcaccaggccactgtgctgtgtgtttctctgtctcctgaagcagagtcctgggcgcagatttggaacctattcgtgggcttgtttgatcccagctgtgactttcagtaccagggggtcctttgctgtgacttgaatttgtgttttctttactcttaagttccacagatgctgagtgacccagaccctggtcatgctcttgtgctgaaaggaaaccagcacacggggaggtgagcagtatatgaaacaaaatcatgtatttacaaccagtggcaagacttactggcaggtgctttgttcaaacactgttaggaatttgaagatcatggcagtagaatgtgaaaccaagtgcagggtccttccaaatgcaggcctctgtgcaccaaagatagacttttggagctcattttttttaaacaaaaacggaaacaacactctatgttcatggctgtaggccatgcgagaatatttttttaaattttaatttaatttttatttttccatatattattggggtacaggtggtatttggttatatgagtaagtttttagtgatgacttgcaagactttggtgaacccaccatctgagcagtatacactgcaccatatttgtagtcttttatccctcaccccctcctgctgtttccccaacacttccccaaagtccgttgtatcattcttatgcctttgtgacctcatagcttcgctcccaaatatcggtgagaacatgctatgtttggttttacatttctgagttacttcacttagaataatagtctcccatctcatccaggtagatcattccaaatgctgtttattcattcctttttatggctgtgtagtatttcatcatacatatatgatatatatatatgatatatatatgatatatatatcatatatatcatatatatatgatatatatatatatcacagtttctttatccactcgttgattgatgggcatttgggttggttcctttttctttatcactaaattaatggcagcaataaatccagaacattccttattaccctaaagtcagccctgtctcccaaactcccttacacatcaggacacctttgtgcccatagatcatgggcagtgcttggcagccaccactgtgcacacagagagggtagtcagtagcgttaggtggttctgcctgctggggtctcaccccaggaacagaaagcaggagccctgggtggagctgaaagtgctcatctgggtttgtcaggagtcccatctgtcagtgaattcacaagaaacagaacaaaacaactcttccaatgttgatgagcctgcccctgggatttggaaagctaataacagagaaaaccaatatagacaaaagattttaaacaggactatcggattatggtcatttaagcaaattagaaaaggatacttgaaggagtatttgggacacaggaatcaaaaacaccaggaagacatgaggagtttttccaagattgtagactatagcaatacttagataaccaataccagtgtattaatgagtaattattagtattattattttgagatggagtcgcactctatcatccaggctggaatgcagtggcatgatctcggcttactgcaacctccgcctccctggttcaagaattctggtgcctccgcctcccgagtagctgggactataggtgcacgtcaggatgcctggataatttctatatttttagtacagatgggatttcaccatgttggtcaggctggtctccaactcctggcctgaagtgatctgctctcttcagcctcccaaagggctaggattacaggcatgggccactatgcacagccaagtaatttgtatcatcatgggaataaaaaatatacattgagttacaaactaattaccaaaagatatttaaaaaatggtagacttgcatcgattcagacaaaggcattcttcccatccaaactgttcactggtgcattgatcttgaatttgaccatctggggaaggggcgtggcctctcctgacagcaaggctctggggcccaggcagggagaatgaggtctcagaatgacgcccttgaaagacgtgttcccttttcaccaatgcacagacccagaggacccctccatcctgcagttcctgccatgagcctcgggctcctgtgctgtggggtcttttctctcctgtgggcaggtgggtcctgggcggggccccttgtgtggatttcaaggcccatcccctttccactggagctgtagcatcagctttgtccttctctgcaggtccagtgaatgctggtgtcactcagaccccaaaattccgggtcctgaagacaggacagagcatgacactgctgtgtgcccaggatatgaaccatgaatacatgtactggtatcgacaagacccaggcatggggctgaggctgattcattactcagttggtgagggtacaactgccaaaggagaggtccctgatggctacaatgtctccagattaaaaaaacagaatttcctgctggggttggagtcggctgctccctcccaaacatctgtgtacttctgtgccagcagttactccacagtgctgcacggctgtctcctctctgcacagaaaggcaagggaaggtgctgccctcctccgcagcacagattcagcgatgcccttggtcctagcaccgaaaactttggagccccaatgggcccgggcggtgcgagccttcatctgtgccaggtgcctctgcagtcggtctcggccaggcctggatcggtcccaggacctcagatgtcttccttgttgccctccggtctttcctctgaggtgtccttttgggctagtgccaggggtttcccagctctgactttcctagtcattcacctgagtctgaggcctcctaggtgaaataggatttgtatttcagatccatctagactcccgtctctacctgggtaccacgtgctttcctctctctatgatttttcctcatgttgaaccctacggtggtctcagctgcagcctgcatttcctatattcacagtcgccctccaaggccttgctgggtttctcctccccgacctccctgcccttctctactccagccatgttgagagactccaaagtccatttcctgtgccctgggctggagccttcctttctgtagtggtcaacacctacctgtgcttcagatctcagcatcatcagccctagtgataatcaccattatgcttcccttggctcccagctgaggtcagtttccctctcataatctctcatggtatcatgtgtctgttaatcagtagaatttagcacagttggaatcttccaagtactttaaaccccatgaaggccaaggctatgcctgggttataaatcagcagctgagcctggcacaaggggagatgcatttcagagaatggatgagtcagtgatggagtgagtgatgagtggatggatgaatccataacaggagcaccctagatccattttacccttgcggagatctggctgtaagtacaagaactcttacccttttgattgctgggctacgggaggtccttgaaattaatggggagtcgctatcatgggcggccccaccttggtcaaagattcctcctgagtctgcagcaccagacctcctccaggtctctgtgctctccttcagactctttcccacaacaactctacacagatcagagatccctttccagaaacccatgcatagagttgtgttattttggaaccacttctggtaccaaaaactccattaggtttacatcaataaaacagaatcactaaaagtactatggagaggaggatttatgacaggagttagaccttatataaatgtagggggagctgaggaagagaaggtctggaggggagatatagctaggcagatttaattcatgattaatgtgaccgtgacctcttattctactcaaaggagagcatatgatttcaacaaaaaaatattgattttcctttgtaaaagtttgatccaaatagtgagctatttttgtcccataattgtcttaagttggctaatggtggaacaaatccgactttgatttccttgaaagaacaggaaaaaaaccgtcattcatatacagtcttacaggctctattttatggaggaagcataataaataggaaagagaaaatcagaattctcttctggaacctacattgggactgtcctcagagcaggttgtgatgtgaggaatcaaatctacaggggtatttcgcagcttggagcgcagcagactgttcccgaccccatgcatttgggggtgagaccagagacagttgaaaaactatggaatcttgacattctgcactctcaagcctggcctctccctgaatttcacagattaacatcagaccaatttattccgactattaaaagtattagaacaaaaaccaaggaggaccagtgagcagaagcaataaaccattaaaatggacatcctaaagatttaaaattttgccatcataagatgtgaacgtttgaagagctgcatttaaatgaatacaagaagggactgaaacaagaatacacacaaaaaagagacggcccgaaaccatcaaaaaacattaaagaaataatcaaatagaatgtctagaaatcattacgattactccacaaaacaaaatggaagctaaacagcagattcaatgcttctaaagagattgttagcaatatcaaaggaggatctcaagaaatcacctagaatgcagcacagaaaattaaatgtaaaatataaaaaaagtgaaggaacaaggaaaaaatgaagtttctagaatattagaaagcatataatgttttattgaaacttttcttactttcttgtatataactgacgtttcagaaagagaaaataaggcaaatgatctgaggtgattgtgtatgtgatgctagctgagaatgttcctgagatgtttgaggaccgaaatcctcgttcaagaattcagatgaattgcaagacaagtaggcaggtccctgtgaaactgcagaccacaaatgacaaagaaaagattttaacagcagtcaaaagggaaagataaatatcctccaggggaatagaaagaaagaaataatcaaagtcaagaaagaggattaaaaataactgttaaatcagaattgagattgataaaaaatacctacaggacaggacaagaaaatatggaaaaccaaaataattctgtgagtttgccaccaaagtatcttttcagagttatagttaacaagggtgggaaatgatcccagaagaaatgtatgagggcagtttgtgagggaacccatgtgatgggacaatcccgttgggcacatgtgagtgggggaatggaggaggctggggcatgaatggggatggcagaggggaccctgacttggaggaaagacaatgagctcatcccatggtgcctggtgttgggggcactgttggcacatcctacagaacgtgctcagcagacagaggagcggctgtgggatgagaaggtgaactcggagatgcagcgtgaggcctccaagtccagacagcatgggagcccaaagcgatgtcccatgcaataacgttgtttacaaggagcttataaatatttaaagtagtcacccaagtgtggtctaatataaatcctgtgttcctgaggtcatgcagattgagagaggaagtgatgtcactgtgggaacttccgtgtaaggacggggcgtccctcctcctctgctcctgctcacagtgatcctgatctggtaaagctcccatcctgccctgaccctgccatgggcaccaggctcctcttctgggtggccttctgtctcctgggggcaggtgagtcctcagacaccaaccattctcattgtgtgtgtgtgtgtgtgtgtgtgtgtgtgtgtgtgtgtgtgtgtgtaggggtgggctgtgtgcattcgtgtgatgactaaaattattttcctcattctgttcccaactttgtctccacagatcacacaggagctggagtctcccagtcccccagtaacaaggtcacagagaagggaaaggatgtagagctcaggtgtgatccaatttcaggtcatactgccctttactggtaccgacagagcctggggcagggcctggagtttttaatttacttccaaggcaacagtgcaccagacaaatcagggctgcccagtgatcgcttctctgcagagaggactgggggatccgtctccactctgacgatccagcgcacacagcaggaggactcggccgtgtatctctgtgccagcagcttagccacagcatggcacagtcgcctccttcctgctcataaacctcatccttctctctccttgcagctcctagacacccttaacagaggcttctctttgcttctccctccccatgggaaacaagtagatttggacctcagcttgtcctttgggtagaaagagaccacagatttacccttaagacacagtaactgtaaatgtgggtggtggaagcaatcgtggcccaccgggctattggagtcctcagagccagctcattgctctaaggcaagcactgggtgtcttagccttggccttcagggctgggacacacagtcttctttggggcctgggaggttgctgcccacatagagaagcttcgggcatggctgaggaacaggtgtcttcccctacatgtgttggggcatctgcaaggtctgaagcttcatccacaagaacattctttcttctgaagcctcttctgttacattggaagttttctgcaatacaagagcaaaccattcttcctgtttgatttaaaagtctttgtggcttttgtggccattacttggtgaatacagccaagataacaataagacttcgtttcttctgcctagtgtaagcaatgcgagttctttattttgttttcatttaccactgctcctgtcctgagagactgaagcatgcgtccactactgctccagtatcaacttggttccctaggaaatcgggtttctagaacctgaatgctgacaaataagagttgtgtacatgtataccatgcaacctgcgtttaaaaatgtatgtacatggtgaagtgactaaatctagctaattaacatatgcagtacctcaatccttatcctttcctgtggtgagaatacttgaaatgtactctgttagcaatattccagaatacaatccactgttactaactttagtcactgtgttgtacaatagatcttttgaacttcttcctcctatttgagtgaaattttgtatcctttaaccaacatctccccagcaccccatctccatcccaacctctggtaattgctgctctagtcttttgatttgaaataatttccctgaggtctttaacttgagaagatggagttttaaaaacaataatgcttatattacttttgttttgtttgttattttacatattgcaatatagtgtttgttgcaaatataaatgagtatactgtaataaaaattcttcacctctctttgagtgaagctacatttcacatatatgaaatttcaagctgtggtcagagctgacatgattatggatcatgggtttctgggagtcctcagagacagccctatacacaaaggttaagatagattatcccagacccagccaggacagaggtgccctgagtcctgcagagctggttggggaattatagttccctaaattcacttatcagaaattgtggtagctcagataccaaatttctttctctagcaaatgatgatcgttggcagggattgttctgaatccattctaattgttctatcaacagatcattccttttttagttgccctgtgtgtcctgggagtgaataagtcccaggcacagatgggaatttcctgaccttaggatgctgttccaaggacttccttgctagaccctgtctccagcttttcccacctttatcctcatgacccctaagacaaatggtcctaataatggaccagctctgaaacttaagattgaacagaacacaaaccacaactgtaaacactgatgctgaaagaagtggtaaaaaaaggtgagcagggtttcccacctgcactgagagttaacatacaaggacagcaaagggaaggttttattaataagcaaacaagaagcaataaaggccctgctccattgaatgtaactaatctctttgagttaaaaaaggagcacgtcaataaaagtatttcaaatcaaagtctagaagtttccaaaccagccagcacaaccctgagagctctgtgctctcagcaacttcagagaactcatcaatcctttctgggctcaaacttccctttgtccactcgaagacccagggtcacactctcatcctattacaaaaacaatgggctttgctatcgttgctgatgcctcatttctaggagttgagtattaagcactgaagagctttgaaagttgggcttctgagtcaattgatgtgctggagccaacttttctgactcacgagagacaaataggcacactcttcccagctccccattcagtgaagccatgttgacagcttgaaatccaccatagtgcctgtgttgatacaacagaaattggtaagtactactaggcatgtgcccacctccacagacactcagtgtaccagcacatcactggaatgttttctgagacagtgatgtccctgttatgtcgtcatgtcttgtggggccaaaaggactccgaattcacctcctctctgttcttgcttttagaaaccataatctaaaataacctcacctgacactatttctattcaatctccaaattccctcactttgtgggtctgtgtctcctgtaagcatgtcagtccacaacttgacaactattttgaatgtagctaaaggatacagtgaaccagtttattattttcaaattatccttccttgcatggaatatgtagatgctgcagtcattgggaacagagatggggcaagcagcagctctgggccgtgaaccactttagagtcagacaattcttcagtggcacagacacacccttgggcatggactaatttgctttggaaactaagcagttccacaccagtcaccaatgaccttggatctatttccagctgagaggtcaaaaagatcacactacctaaatgtcctcctctccaatatatagtacagcccccatccatctcagtccctggaggtcatccagagctcccagagaatctctgctctggggcagaatcaccacgtctcctcctcgccagctccccacaggctccagcaaggctttcctgccaggtgcagggcatgggtgtggctctgctgtctctcaggtagagggaggccatacgatgatgtttgtataagaaggattgggtttcagaggttcctctcaaatacttgacataattttatttgctttttgtttcactctacaatgtcaccatttaggagagcaattattttggttgcattatttatggaactttgaaagatttttgtggttaaattaatttaagaaatcattcccattgtgcatcttttctgttcagatataatctgaggcagtgaaagaaacagcaatgattctgaaagcagtcacttacatgccctctgataaaggcattgttcaaggttcattactcacacctaactttcagtctactggaaatgaaaggcacagagttgggggcctgtgatcaagccacaagagaggactataccagctactctgggacttcagggcacgaagagatgacctcccctttagactctgctcaacgacgaaggaatgagttggtccatgggaacctgaggagcagaaattccgggagcctttaactgggacggagcaaggactgtagagcaagtcattggaaagggaaatggttcatctggtctgtcacagaagatagtggatagaaaggtcatataatccccagttccctggctgatttgcttccttatgatactattttgcagcagcgtaccgtcatctcacaccactcctctacctcttccagaatcatctcctccctctctgctgctcagatcagcacatgtgcattgcacaagctattcttttactgtagcagaccttttgctggtcttaattatatccatccttattttcccattagatactgctccctccatgattgcttattgccttgcaagggatcctttaccccgcgcccccagacagagtctcactctgtcgcccaggctggagtgcagtggcgcaatctcggctcactacaagctctgccttccgggttcacgccattctcctgcctcagcctcccgagtagcgagtagctgggactacaggcgcccgccaccacgcccggatgattttctgtattttttagtatagagacggggtttcaccgtgttagccaggatggtctctatctcctgacctcgtgatccgcccgccttggcctcccaaagtgctgggattgcaggcagaagccactacgcctgaccaagggatcctattttttatatcccagttttactttttattaacacatatctgaccccatcttgaaggtaatcacattatctgcctagacttttgctaatctttatttttatggtaccattgtcatttggggggacatatttgtttatctttggtaatggaaatgaaattacgttacacttcactttctgtgttttcttcctactttagggtaaatattatttccttctattcttcctattctattcctctctctttagatagttttaagggagaaaatgtcagtgagactgtaactgcagctatggggtaagaattatttagaatgagggtgggatattaagcttgataactcaaaggaacagtcagggttaaaactaatgttgggatcggggttcagagaagttgcttgtaaaacctgcaggatggcacttctggaatagtctcccggctccctctgcagacacttcccagcatcccttgggccatttcccttgcaaaagcaatgatgaaatttcacttattggccacaagatggcactgtggtccactgggctctaagagactctggggagagcctgggagagcagcctaggaaggaaagggttaagaaaaatcagggctggcatccaatatcatgcagatgttgcagcagttttcagttattgctagactacctacagttatacaacatacaggaaatacctctaatctttaatgagatccacagttgaagaagtttggcctggcagccttggtgtcaagggcaggtgcagacagaggagcaactatctcagaggaaaatgggaaagtgaggggtgggctgtggcttaagcccagtgcgtctctgctgcaccccgtcttccctgcagctcttaccaggcaacagcctccatgagagtaggtggatcctgcctgagcccagtcagaatgccccggactaggtgaactctgtaggcatggggagtaacacaacaggcccacctttcacacgttttttttttttttttttttttttttttttttttttttttttttttttttgagacggagtctcgctctgtcgcccaggctggagtgcagtggcgcgatctcggctcactgcaagctccgcctcccgggttcacgccattctcctgcctcagcctcccgagtagctgggactacaggcgcccgccaccacgcccggctaattttttgtatttttagtagagacggggtttcaccgtgttagccaggatggtctcgatctcctgacctcgtgatccgcccgcctcggcctcccaaagtgctgggattacaggcgtgagccaccgcgcccggcctcacacgtttccaaagtctgggctccaagcctttttttcccctttcctctgcagagtcctgccacttctgaagccttgtcctcactttctgcctgcctctcccacagcccccatggaggcagggatcagccagataccaagatatcacagacacacagggaaaaagatcatcctgaaatatgctcagattaggaaccattattcagtgttctgttatcaataagaccaagaataggggctgaggctgatccattattcaggtagtattggcagcatgaccaaaggcggtgccaaggaagggtacaatgtctctggaaacaagctcaagcattttccctcaaccctggagtctactagcaccagccagacctctgtacctctgtggcagtgcatccgcagccctgcacagccaactgctctctgcacaaaaaagggcagccacaggctggaggtgggcactccttcccaaggcctctatctcaaccaggagataaagatgccttttttgaagctcttctcagatgtcccagcaatgggctcccagtctgtgcatcctcctgcagcaggaacttcagtgtgagctgaggtccatcactgtgatgtggatgcacgaatgcaaacaacacttaatgttattttactcaattcagaatattctggcagttgcgtaaaataggaatagtagctcccaaaatgaaatttgtgtctcattttctttatgagagaaaagaaaaaaaaacagaaagcagctgggcagctttaacctgcttgagtgatctgggattctacaagtctacaagtggtacaaagaacatcaccttggcctggattccaatggataccaaacactacaaaaagtattgaaaacaatttataaaagacctaagtaaacaatctacttataggaaatgttagtagatccatcgcatagtgccattatacctgacgatgatcaactagtgaaattattatgtagagattatcagctaagcctctacttattacctctgagcatagagcagtgtttgagccttctgagggtatcttaaggaaggaacttaattcttaccattactttggcttggattaaaatccatgagcttgtcgtttttattgtaaaatattacagaataataatgatcaaacgttttattttcctctagcgtttattcctctttagaacgtgcaggttgaagctcacacacatgagcagggttccttaagatgagatccattaactccaggactgggaggtacacagctggccttcacaggaagtgcaaaccccaaatgcagtgacccctcctgtgtctacgctgtgcccaatacccctctgtgaggctgccataaaggcgggcaggctccttgcttggcaaaaaaatcagttcaccaattggccactttgctgaagaccagaataaaaggctaaattgtgagaatgatgaatgcccaattcccaaattgtgaaatgtgtaacagttcacgattcttggaataatttcaaccatgtgtggtttgttttttttttaagtttttctttgtcgacagctttctttcggccactgatcctcagttgtttcccagccgccttgtcagctgatctcattttgatgctaatttttttttttttttgctagctttgggattatttgttcttgttttactatgtcctctaagtgtggtggtaggttgctaatgtgagatctctctaacttgtttatgtgggtgtttcgttctgtaaacaatactcctaacactgctatagctgtgtcccagagattctagtatatttaatcttggttttcattagtgccaaagaatgtcttgttttctaccttcattttatggcttacccaagtcattcactagcagattgtttaatttccatgtaattgtatgattttgagagatcttataactcttgatttctattttttttgtgctgtggtccaagagtatggttgacatgatttcagttttttttataatttgtttacaattagtctgtgtccaatcatgtggttgatttcagagtatgtgccatgtgtagatgagaagaatgtgtattatgctgttattgggtggagtgttctgtagatgtctgttaggaccacttagtcaaatgttgagtttagtttatgaatatctttgttagttttctgccttgacaatctaatactgagtgttgaactcttccagtattgttgtgtggttttctacgtgtctgtaggtctctaagaacttgttttatgaatccagctgaaccagtgttgggtacctatatatttaggatagtgaggtcttcttgttgaattgggccctttatcattatgcaatgcccttctttgtcatttctgataattgttggtttaaagtttgtattgcctgaaattagaatagcaacttctgctcttttttgtttcccattggcttggtcatttttctccatcgctttatgttgagcctatgggagttgcatatgagatgggtctcccgaagacagcatacagttcagtgtttcacttgtctatacaactggacgctctttttttttttttttttttttttttttgagatggagtctcgctctgtcgcccaggctggagtgcagtggcgcgatcttggctcactgcaagctccgcctcctgggttcacgccattctccggcttcagcctcccgagtagctgggactacaagtgcccgccaccacgcccagctaattttttgtattttagtagagacggggtttcaccgtgttagcccggatggtcttgatctcctgacctggtgatccgcccgccttggcctcccacagtgctgggattacaggcgtgagccacggcgcccggcagctcttttaataataaacgacttttatgtgctgtgtttagcctgtttacattcaaggttaatattaatacgtgtagatatgatcctgccattgtgttcttgcttggttgttatgcagacttgattgtgtagttgctttataatgtcaatggtctatgtacttgagtgtgttttttggtggctgttagtgatctttcatttctatgtttaggactcccttcaggacctcttgtaaggcaggtctggtagtaacaaattccttgaacatttgcttgtctgaagggatcttatttctcctttccttatgaagcttagtttggctggatatgaaatatatagggatactggttggaatttcatgtctttaagaatgttgaatattggctcccaattgtttctgccttgtaaagtttctcctgaaaaacctgctgttagtctgatgggattccctttgtaggtgacctgccttttctttctagctgactttaatattttttctttcatgttgaccttggagaatctgatgactatgtgtcttgggggtggttgtcttttatggtatctcataagaattctccgtgtttcctgaatttgaatattaaactctctagcaaggttagggaattttttgtgctcaatatcctccaatatgttttcaatgttgcttactctctctccctctctttcagggacatcaatgagtcataggtttggtctttttacataatcccatatttctcagaggtttacttcattcatttttcttttttttccattctttttttgtctgactgaattgattcaaaaataagtgttcaagctctgagattattttctcattgattatgctgttaatacttctgattacattatgacattgttgaggttagtttttcagctctatcagatcaattttgttctttcataaaatagctatttcatttttcagctaatgtgtcattttattggattcatcagattccttagattgactttcagctttcttccgaatcttgatagtgtttgtttctaacctgtttctgaattctatgtctatcatttcagccgcttcagcctggttaagaatcattgttgggaagctagtgtgttcatttggtgctaagaaggcactctgactttttaagttgccagagttctttcactggttctttctcatctctgtggtctgaggtttctttaatcttttaagctgatgtcttttggaagggttttttgcttttatattctatgcccttgagggtttcactgttacataagctgggttcaggagactggcttcatttatggaatatttcagggggctaagattcagctcagtatgtctgggctgcgtgttgtaggcctgtggtgctggaattaagcccagagctttggtttttgaccccttaaggttaaagcacctgctacaccagaggggctgaggcgttcccaattccactggcaacaacactgcaatggggaatgccagccaaagtactttttccaaatggtggcattggggtacatgctcagaagcatgtgccaataatggcaatgtggcagtttccatacatatgtttgtgctagcttttttattattatatagtaaacttctttgcctctttttatagttattgtcttgaaatatattttatctgatatagatatagctactcctgatcttttctggttttcacgtgcatgaaacatctttttgttatctcttcactttcaatctatatgtctttttaggggaggtgtgtttcttgtaagtgacagatcattgggtcttatttttatattcattcagctactctatgtcctttgattggtgagtttagatcatttacattcaatgttattgttgataactaagtactggctcctgccatgtatttgttttctggttgttttgtggtcttctcttcatttgtttcttctttcctgtcttctttttagtaaaggtgattttccctgataacgtgttttcatttcttgtttgttatttttgtgtatctgttgtatgtgtttgtatttaaagttactacgttgcatatgtttgtatttaaaattactatgcatgaggcttgcaaataatatcttatactgatgacaacataacactgattgcctaagcaaacaaaccaaaaaaaaacagagaaaactagtaaaaatcttatattttaacattgtccacctacctttcaactttgtgtcatttctatttatatcttaggcactgtctatgtcttgaaaagctgtagtttttttttttaattggttcatcttttagtctttataagtagtttacacgccgtaatcacagtattataatattgtgtttttcttcgcactattatcagttagttttgcacctgcagataatttcttatttctcattaatgttcttttctttcacgctgaaaaattatcttttgcatttcttctaggacaggtctggtgttgaggaagtccctcatattttgtttgtctggggaagtcattatttccctttcatgtttgaagggtattttcactgagtacactattctagtattaacgtttttttttttttagcattttaaatatgtcatgctgctctctcatgacctgtaagatttgcactgaaaaagtctgctgctagactatattggtggtccatggtatgttatctgtttcttttgctgcttttagaatcctttctttatccttgaaattttgatttatccttgaagtttgattattgtcttgatgtagtcttctttgacttaaatatgcttggtattctataatcttcttttacttgaatattgatatctttctctaagtttgggaatttctctattatcatagctttgaataaactttcagccctatctctctctctacctcctctttaaggtcaataactcttaaagttgcccttttgaggctatattctagatcttgtatttgtgcttcattaatttttatccttttgtctcctctggtggtgtattttcaaatagcctgtcttcaagctcactgattcttctgcctcatcaattgtgaggttgaaaccctgatgcattcgtcagaatgtcaattgtattttcagctccaaaatttctgcttgattgtttttaattatttagctctcttccggattctgaatttcttggctgtgttgtcttgaattttgttgagtttcttcaaaacagatattttgagttctgtgtctgaaatgtcacacatctctctctctctctctgggattggcctctggtgctttatttggttcatttggtgaggtcatgttttcctgaatggtcttgagacttgtggatgtttgcctgtgtctgggcattgaagacttaagtatttattgtagtctttgcagtctgggcttgtttgtactcgcccttggaaagcttttcaggtatttgaatgtacttgggtgttgtaatctaagttttctatctctgaaaccttatctgcattagggagcaccccaagtccagtaattctgtggtccttgtggactcacagatatactgccttggtggtcttggataagatctgaaagaattctctggattatcaggcagagactcttgttctcttccttcactttcactcaaacaaacatctctgtctctctctctgctgaactacctggaactgaggagtagtggtacaagctccctgtggctgccatcactgagaccctaggtcagaaaaagccagcatgataatgggtctcacccaaggtccacagtaaccactgccttgcttgttgcctatgttcaaggccccagggatctacaatcagcatgtggaaaagtcagccagtcttatacccttcccttcagggtcacgaggccccctgaccccaggcacatccagagatgttatccaggagccagggcctggagtcagaaaccttggggatctaactggtgctctattctgctgcaactgagctggcattcaagtcacaagataaagttatttccactcttccctgccctttcacaaccagaggagtctctccctatggctaccaccgccccaggcccacagcaagaattgcctgactattgccaatgttcactcaaggcccaaggactctttagccagcttgtggtaaatgctgccaggcctgagactcttctttcagggcaatgggctctcctctggcccaggactggtccagaaatgcaatccaacagcaaagtcctggaatccgggaccccaggagcctactttgtgctctactccactgtggccaaggtggtagctaatctgcaagacaaaggctcctttattattccctctccttttatcaagcagaaggagcctctcctcatattcatcacagctgggaatgtgctgcatcacacctgaaaccagcatgtctcagattctcacctaagctctatggcaagtactacctgggcattgctgctgattattcagggcccaagtgctctttattcagcagatgatgaatctttctgggccttgttccttccccacaaggcagcaggttcccttctggcccatggtgtgtttagaaatgtcatccaggagctagggcctagaattggggcctcagtactctgctcattgccctatctgactatggctgagctggtgtctgattttcaagaaaaagtcctctttactcttccctctcctgtctttaagtggagagaaggtatattaggccattctagcattgctataaagaatacctgagactgggtaatttataagaaaagaggtttaattggctcatggttctgcaggctgtacaagaggcataacactggcatctgtttctgggaaggctccaaaagcttataagtatgcagaaggccaagggagagcaggcgcatcacatcgcaaaatcaggagcaagagatagagagtggagggtgtattagtctgttcttatcctgctaataaagacatacccaagacggggtaatttatttaaaaaaaaaaaaaaagaggtttaatagactcacagttccacatgtctggggaagccacgcaatcatgacagaaggtgaaggaagaccaaaggcatgtcttacatggcagcaggcaagagagctttcacaagggaactcccatttataaaatcatcagaactcctgagacttatttactatcatgagaacagtatggagaaaaccaccctcatgactcaattatctccacctggccctcgccttgatacatgatgattattacaattcaaggtgaaattgggtggggacacagagccaaaccatatctgagggggagctgccacacacttttaaatgacaagatcttgcaaaaactcactcactatcgtgaagacagcactaagccatgagggatctgcccccatgacccaaataccacccaccaggccccacctccatcactggggatgacaattcaacatgagacatgggtggggacaaatattcaatctctgtcattctgccttttttctctctcaaatctcacatccttctcacattgcaaaatacaatcatgcctttccaacagtctcccaaagtcttaactctttccagcattaactcaaaagtccaaagtctaatgcctcatttaagacaaagcacatctcttccaccttactagcctgtaaaattaaaaatatatatatttactcttaagatacaacaagagtataggcatggggtaaacattcttcttccaaaagggagaaattgggcaaaagaaaggtgctacaggcgccatgcaactttgaagcccatcaggagagtcattaaatctttttgtttgtttgtttgtttgtttgtttgtttttgagacagagtcttgctctgtcacccagactggagtgcagtggtgcgatctcagctcactgaaacctctgcctcctgggttcaagtgattctcctgcctcagcctcctgaatagctgggattacaggcacgtgccatcatgcctggttaatttccatagttttagtagagatgggatttcgccatgttggccaggctgttctcgaactcctgacctcaggtgatcttcctgtcttggccgcccaaagtgctgaaatgataggcatgagccactgcacccagccaaagtcattaaatcttaaatctccaatagttcttgactccatgttccacattcagggcacacactggtgcaaagggggactaccaaggtcttgggagttcttcgtctgtggctttccagagttcagcccccagggttgctttcacatgttgttgggtgttttggcttgtccaggcacagggtgcaagctgtcagtgacaatatcgatctggggtctggagggcagttgtcccctttccaaaactccactaggcaatgccccagtgggattctgtatggggcctccaacctctaatttcctctctgcatttccctaatagagattctctgtaaggtttccacccttgcagcaggcttctgcctgatcaccaaagattttccataattctctgaaatctagatgaaggctgccaagctttcttgattcttgcattatgtacacctgtaggcttaacaccacatggaagccaccaaggctatagcttgcattctccaaagtggcaactcaagctgtatctgggcccctttgagccacagctggagctggagcagctgggatgcaggccgatgtgttctgaggctgggcagagcagcaggaccctgggcctggcacacaaaactattcactcctcctaggcttcagggctggtgatgggaggtactgcctggaagatttctgaattgtcttcaggcaattttcccaaagtctttgctattagcacttggctcttttttaactatgttaatatctctaacaagtggtagctccacagcctgcttgaattcttctcccacaacattttctttatttgccacatggttaggctgcaaattttccaaacttttacactctgcttcctgtttaaatatacattccagctttcagtgttttctttgctctcacatctgagtgtaggctgttagaagcagccaggccacatcttcaacactttgctgcttataaatttcttccaccagatacactaggtcatcactcgcaagttcaaacttccacagattcctagggcagaggcaaaatgcacccaagttctttgctaaggcataacatgtgtgacctttgccccagttcccaataagtttctcatttccatctaagacctcaacagcctggacttcactttccatatcactatcagcattttggtcacaaccatttaaccagtctctcagaaattccaaactttccatcatattcctgtcttcttctgagccctctaaactcttccaacttttgcccattacccagttccaaagctgcttacacattttcagttatttttataacaatacccaacttcttgtatcaattttctgaattaggccattcttgcattgctgtaaagaaatacctgagactaggtcatttacaagaaaaatggtttaataggctcatggtttttcaggccgtacagaaggcataacaccagcatctgcttctggtgtagtctcaaaagcttacaatcatggaagaaagaaaaggggaggcaggcacattacatggtgaaaacaggaacaagagagagaaagagagtgtgtgggggagggagggaaggtcatttaaaacatacttttaaatgaccagatctcacaataattcattctctattctgaggacagcatcaagccataagggatctgcccccgtgatacaaacacccctcaccagcatggggattacaattcaacatgagatttgggtggggacaaatatccaaactatatccgaaggagtctcacctggagctgtgggctgtgctgcctgaggttggggatggggtggcataagcaatttcttggccaccccagctggtatctcactaggtcatgtgtccccaagtccactgactctgagttcagcacagcaccaagacttgcccaggaattgtagtccttgtggcctggactgtgtttcaagtttatttaggaccctaaggcactttagcccatggtagcgaggctagccagaactcaggttctgactgctgggataagtgattcccctctgactagggctggtctaaatgttcttccatgagtgctggctgagtcctgcctgctgttgctatccactgtgtgaggacagcaacgacttccaacacaaagtcccacagtcactgcactctccctaacccaaatgcacagactgtctctccaagccatatggccactgccaggggatgggggaggcatggtattggcaattcaagagtgtcttttctacctctttagtgcctctttcagtgatatgaagttaaaaccaggtactgtggtcacttagttgatttttggttcttatgaaggtgctattttgtgtggatagttgttcagtttgatgttcttgtttggaggaacagttaacgaaggcttctatttggccatcatgttctaccttcttcttaatcattctattgggtctgtagtgatatctctatgcatttttctataagtaattatatttacatttttttctgttttcattagtaatttctatctccttttttcaagtgtctgcttttaaatttgcctgttttaaaatcttacgttgtttgttcttatattactaatacgtataatatgtttgtattttttatataaaccttttgaccattaaatatattgagttagtcttctcccagagtggcctgcctttgtactttctgaatagtgtcttctcatgaactgaaattttctattttttgaagtttaattcatatatatttttccttttacagtgactactctttgcatttcaaggatatcttgcctataacagaattatgagttgttccattctgttacttactctactcctcctcattagtagccccatccctttttctttgtcatcacttgaaaatgctaaatctccaaaatcacaaattaaatattccactatctgcctacagcttcttatcctatcatacctgttctttgatattattgacatctcctctccactggtaaatattctttctatttcctagggtccctacagaatttctttactcattctagagcagatatgaggatgctacgtgttaaaaatcctagcttgcaaatagttattattttatattgatactcttaggcttccctttcatttacaaaaataaacaagaataaatgcactgatctctttggcatggcagaagctgaatgctgtcagagtaagtcacaccggcacaaactgttatcatgataaatacatagtcactaagcttacctgcctttatatccctgctttgagattatagtatggtccttttactagctcagtctttcaccctcctcaaatattgtttcaaatatttaagacttttttccagtccctaattcttctcttcttgcctcttaagccaaaggcacatcttgttaggacatgctggaccttgcatctctgcaattaacacagtttttctactgtgtgaaggtgtcaccttgagtgaagatggttcttgcggacgggaacccagtgtggggctcaactctaaagggatgtggcaatgggtctgaaaatgggttctcaatgaagcatcacagtgtccactatgtttatgaagtagatccaccctgccacagacttctaggtaagagtaggtgatcatgcatcatgattctctactagaacctctttagattccatgtactcaagtcatactatttattttcatactgcatattttaatgcttctcccaactcttttggtaatgctaattgcatgtgatagaattttcgttactgctatttgcaaagagtgagaaattgtattatttctaattgcagaatgttagaacttgtattattttgttaaagcaaaataagatctccaagactcacttttccattgctatgtctattaaccatggtcctggaggtattgaggagggatgaaaagacaatttacaaaactgtggcaaggttaaggaacccagtaagagaagagaaaggattatggggatagtatagtgagtgctcttattcacattggcctaaaagaagtaggagagtgtgtggatctcggggcttttgacattttacatttggggtaaggatgtttgtagggtgctgtgacctttggtagagaaaagcaatcaatatgaaatagtccagcaaggaggcagccaggagacacacaaaccgggacagttggttaccctctctctctctctctcctgccattgtctctcataagacaaactcactctggagtacacaaaaagagatgcagttactataatccattggcatcaacctctgaaggcaggatggatctggagggataaacataacctgcccagaggatgactcatagggtggccttgtgggtgctgaatcccaagtggttaggtctgtgctgtgagctgataaagccccagaattatttatggggaatctatactcctaataatttacagacaacacagatccactttggacttgatcagatggacaaaatcttggggacttgacatcactgcgcacacaggggaggagctgggattgttgtccaggaaaggaaaatataaggagaaaccttggtttgaatttggtgtcagacatatgatgagaggacagccaggaagatctggaacatgaagatttaattacaggccactaactctcagctgacgggcaggtctgtgagttccagaatggagcactgcagcagtaggtggggaggaggctgagagggcgatgaggcagtctgagtgctgagggcagtgcagtcagagaagcaactgcctcatcacagaagcttctgcccttactcagcccccttgctctgcaggatgaggagggagttccatgggtagggaccactggacctaaggaagcctgaaggggaaggaccacaggacagtgacatcacaggatatccttcctatcaggaaaagtgaggctcagaactcagctcttcctgggaggaccaagccctgagcacaggtgcagtgctgcctgctccgctgtgccatgggctccggactcctctgctggacgctgctttgtttcctgggagcaggtgaatcctgtggacaggacagcacccctattctcagcttgcccacccctgtgtcccccacttcaccatggggaggcacaagttcattctccacctattttttcctcaggcccagtggaggctggaatcacccaagctccaagacacctgatcaaaacaagagaccagcaagtgacactgagatgctcccctgcctctgggcataactgtgtgtcctggtacctacgaactccaagtcagcccctctagttattgttacaatattgtaataggttacaaagagcaaaaggaaacttgcctaattgattctcagctcaccacgtccataactattactgagtcaaacacggagctaggggactcagccctgtatctctgtgccagcaacttgatgcaggcctgcagagccaagaacattctgtgtacaaacatccctgccccagtgtggagaacttcagccctaacatatctgtgagaacttgaggactgtagtgggaaagaaaagcagtttcaggaagctggatcctaaaacctggggttttctgccagttaggagtggggataacaaagccaagagggtctgctcaggaggtggtgaaaactaccttcttcgccaaacgctgtacactatagggatagtggaagtgtttgtaatttaatagctggtgccctctttacagggcagcagatttaatttcagggtcaagattcttgataatagtgtggaagggaaaatcatagggtttgctttatataattcagggagaagaaagtgagatttggggaaattctatgaaagagaaaatgatcaaagatagttgaaaacagagatagagcagaaggtaatgaaacatggtgatctgtgcaccatgagctcccttctcctcccacagtttttgatatccagaaaatacaaagaaaggtcttatagcaactgacatcacctggggactggtcctagttggggatatcacaaatagcagcctgcctgatgtgagggccttggggttggttctgacatcttctttctcgacttctggatctagtcttgcctgctcgaggcacagtcaaatacttcccaaaacacaaaggaggtcaggtcagtcttggtcctaaaggtgcaaatgctgtccgttttctcccaagataaaattctgcatccctgggattcctctctgagactcagtgcccagattcaattaccttctgtaattaaacagttctttgaacattttctaaaactcatcagccttggtatcatctgcatttctgctatttccttggcctggaaacttttgttctctccagacacatccagcccctgctcatctgtcaaggatggtctcacatctgccttactctttgcttcttaccctgacattccctggaactggactgtatcaatttatttatttacttttttaagacaagagtctcactctgttgcctgggctggagtgcagtggcatgatcttggctcactgcaacctccatccccccggttcaagctattctcatgcctcagccttgagagtagctggaattacaggcacatgccatcatgcatggctaatttgttttgtattattagtagagacacggtttcaccatgatggccaagctagtctcaagctcctgacctcaagtgatccccacgcctcagcctcccaagtgctgggattacaggcatgagtcactgcgcccagccctggactgtatcactttcttttctttattttcataagaaaagccaagtttataattaatagtatctgaagtttgtaaaatgaaaaagttaatgcatacttatatagaatcctggaatatcattaatcaccatcttcccttcaatgggactcctctttcttaaaatgtaatgaagattcttagagacagtgtcagtttttcatataatttctgcaatattctaagcaattgtgtcttcatagtcagaattgataaccaatgctataaagtatcctaactctaaggctggaatttgcaaatactcttttggagcaaataaaattgtgttgtagtaatattcatccagtctcatgatcctgaaaaaacaaattattcagcataaccacactttccacagccacatttttagagatttgatgagactggaacatcatcaaagatgcttctcagaaatcaacctaaaaaactgaaataaaaattagttaagctcagtaatggaatcttatcatcctttctgagtaaaagatattgtgtgtgcaggaacagaaaaccaaacaccacatgttctcattcataagtgggagttgaacaatgagaacacatggacatagggaggggaacatcacacaccggggcctgtcggggggttgggggaaggggagggagagcattaggacaaatccctaatgcacgcggggcttaaagcctagatgacaggttgatgggtacagcaaaccaccgaggcacatgtatacttatgtaacaaacctgcacgttctgcacatgtatcccagaacttaaagtaaaataaaaaaaaaaaaacccaagatattgtgtgtgtgtgtgtgtgtgtgtgtgtgtgtttgtgtgtgtgtttgtgtgtgttttctgtggagactcagccgcatggaaatagtttctcagggtggcattactaagaggtgttgggtcattggcagagctcctaggtacttctgggtaaagaaaggaaatatcagacccaattgaatctgcctaagttatatacagctcatagggtcgtttatttcaagattttttaaaattcagaaataaatttgtaaaattgaaaaatcctctttatagaatgtgctatctaaaatctgggaataataaatctaaatataggccagacgcggtggtttacacctgtaatcccagcactttgggaggccgaggcgggtggatcacgagatcgagagatcgagaccatcctggccaacatggtgaaactccgtctctactaaaaatacaaaaattagctgggcatggtgacaggcacctgtagtcccagctgctcaggaggctgaggcaggagaatggcttgaacccaggaggtggaggttgcagtgagctgagattgcgccactgcactccagcctgggtgacagagcaaaacagcgtctcaaaaaaaaaaaaaaaaaaaaaaaaaaaagtctaaatacaaagtgtgaaaaggtgtggctctgattattcaaagggagctctggaatgtcgtgtttccagtctggatctgcttgatatcctcacactgtttcaccctgtggcctgtataattctggctcctctcttccatcttaggatactcattgcaatgatgtagcagcagtttattgtgcaatcaagatgtgcccttttgttttcactggccaagggtgaatttgaagttccaccctaagtcaacccttctgggaaagcaatagagagtgtgtgtgtgagagggtgtgggttgcaggggttggtgtaggggcatctctgctcctgacttagacaatgctgagctcatcaggtcagaaggtgtgaatccatgagactggaactttggccacttggaggtgctgtggctccacaaagctgtggggaaccctggggaggggtggagggtgacccaggagaggacggctgaagggaatgcttggctgcgtgctggcatcaggaggcggttggaattcagagtaggtcctgggactgcccagggcaaggtaggcacaccagggacctcagtttgcatcaaggagagaatgtctttgcctctgcatgggcagtggagggtgaagaggctggggcagcaagggctgggagtcagtgccaggaaagtgacaggggttgtcagagaaaaataaggtgggatatgggcatgtggagactgtgttccacctgccccacttttaatttcagggttgtgtaggacaggaatggtgcaggaagcagcagagcctggggtctgacaatgggtagagcaggcaggggtggcctgcagggagagttactgggaaaggccggtttcccaaggaaatgcctgaaacattcctgccccactcaggaaatgaccatgaggtgggtgctgccagacagaggggttcaggccctgcagagctgacaggcctttcccaggcactccctgctgcttctacatgtgatctgctttaatgcccactgatatcaggcagggtaaatatgattttacctgtttatacatatgggggaagcagctgtccctgttctcatgtttagtaactggctatagtcagttcctccaacacctctgcacgccgccctgctctgtacatgtgtcctctcctctggcttcctcatttcagatccccgttagcaggagggaaagatcatgtctcatatgtggtcattaaaacctcttccccgacaagcccaaggaacttccaggtcaagcatctacattcatccttcactgtaggaaagaaaaagaaataaaattttctgcactgtggactttctgtaactgatgtaatataccttgaggaaaatgagcataaatagttgctattcattaattaattaatcttattcttttactcaataaactttttgaggatccttctttgtataaggtattctgtgacataaaattgaaaagaaaaaatattaagtggaaaaaatgtttcttgctttttacagtgttaaggtttgcatttattttttaaattgttttctttattaaaaatagtttactgatttctaaattatacaaatttacttttttctctttttttggctaactagtcccattttagacagccatttaatttaactgtggtaggaatatgtaatatgaaatatatctttttaacagatttttgtatgtacaatacggtattgtaatctacgggcaaaaggttgtacggcaatctctagatcttattcatcctccttaactgaaattgtataccattgacagcaactctccatttactccaatccccagcccttggaaattaccttcacctttgcttccgatacttcgattatttacgttccatcatataagcagaatcatgtggtatttgcctttctgtgcctggcttattcacttagtgtaatgtcctgtgggtttatccacattgtcatatatggctggattttcctctttttaaatgtttaaaatacttctttgtatgcatctaacatgtttaagttctgaagtataaaatgtgtcatatctgactgtttctatgaaacagtctgtcacatgactggcagtcatttgcagaactgcaagcactgagtacactgatgcacattcacagttcaattctgcttcatggagaagacttagagaaaatattaatctaatcattcattatcattttatgatgcacaaaatagaaagccttcattaggaaaatttcaattaattagaaattcaactatacgaaaacatcttaacgtgtaaacgctattctcattttacaggtagaggaattggcccatagtttaaattacttgaccaaattaagtaggaattaggatgcagtactggggttctaaccctggtctatcaaagccctgttttttatagctatatactataatctatttcataacaaatgatgcttatcttcacaaaaattcaaatgttatctcctaggtccctttcagacctgctggctctaataacatcatagacagaaatcagtttaccctggagaggggggggtgggaaacaactatgaatgggtgccatgacatcaagcctgactcccattctagcaccagctcctcaagacgtgaggccagttcttgacagatttggcttagtttgttttctgtttttttgtttttgtttttgttgttgtttttgtttgtttgttttaatctatgaaatgagactgctactgtccatccgcaggctgtgtacaaaattaaatagcataaagtatctagcatgtagcagaaatctagatattaggttggtgcaaaactaattgaggtttttgccgttacttttagttacttttaatggtaagaactgcaatacttttgtaccaacataatattttaatttcctttgataatctcagatagcctctttcaccatgccaatgtgcaaaggcagatgcggacatatgatacctagaaatcttaggttgaggattcagaagtcacagaaatggaaatgtacatttcctctgatgatttatttgatgaaattaactaattaactaaagaatgcagtatggatccctcttgaggtatttaaaaaatcaatgttgttgacatataaattatacaatgtaaacattatacatcttaaatgaacagatcagtgatttttgagcaatatatatgtatatgcccttataatccccacccctcttaaaatgtaaaatatccccacccctattaaaatgtagactatctccagaaagttccctcgaacacctctgcaatgcctatcttggtcccagaaaaccaatgatgtaacttctatcactggagagtagttttgttcacaaatatttttaatgtcaatttaaaacccatactgattaatcctcttgaatacatagctaaataatcaaggcaaggaagagtttctgggaggttttatggttttagaagggattgaaaccatgagagctaccttgatccatggtaggaacgattctatctggagatggatgttgtgccgaaataacctcaaaaggtcttttcagctggtagaagctgattcgacaacatttatttattcattttcattcatttctttgcttctccattcattaactcaaattgtttagtaatgatatcctgataacagttaattatctccaaggaaattattttgagttcccataggacacacatgcagctggttttgtgttcacacactgagaacgctggcgtcaagcaaaccatggtaacagagacttcattgaaagatgatgttacattgggagaagcattctttttgccttaaccccaagtgtttaactcataaatcctgagccttcagctagaattcatcttcctgttctggccctgtcctgggcaccaggatcctgagctgtgtgttcctgtctcttgaaccacaggagtcctgggcacgcacatgaaacccactaatgggcttgttggatcccagctgtgactttcagcaccaggtggcccttagctgtgactttaatttctgtgtccttcactgctaagtgaagccccatagacgctgaatgaccagatcttggtgatgcattgtgctgaaaggaaaccagcacagggggaggtgagcagaatatgaaacaaaatcatgtatttacaaccagcgacatgacttactggcagatcctttgttcaaacactattaagaatttaaaaatcatgacagcagagtgataaagcaagcgtgggatccttctgaatgcagggctctgtacaccgaagatacagtttttgagctccttttcatttattactaaattaatggcaggaatcctgaacgaagggatattccctatgagacatgacacctcaaataaaacgagagcatttttccttatcttgaagtctgctccctctcgccaagtccctcactcatcaggacacctttgtgctcacaagtcttcagcagcgctgggtggccaccattgtccacacagagagggcagtcagcagcatgaggtggttctgcctgctgtggtctcaccccaggaacagaaagcaagactcctggatggagctgaaggtgctcagctggacttgtcaggagtcccatctgtcagtgaattgacaagaaacagagcaaaactactcctgcaatgttgatgagcctgcccctgggatttggaaacctgataacagagaaaaccaatatagacacaggactttaacaggattatggtcaattaagcagattggaaaaggatacttgaaggagtgtttgggacacaggaatcaaaaacaccagggagacaagaggatttttcctaagattctagactacagcaatacatagataactaacaccagaatattaatgaggaattatatcattgcaggaataaaatttatattgaattacaaactgtttgcacaaaagtcaagaaaaacttgaaagccttatatcaagaagcattcttcccatccaaacttcagtggtgcatttattttggatttgaccctctggggaaggggcatggcctctctcgacaagaaggttctggggaccaggcagagagaatgaggtctcaggatgacttccttgacagccctgttcgcctttcatcaacacacagacccagaagacctctctgtcttgtagcatctgccatgagaatcaggctcctgtgctgtgtggccttttctctcctgtgggcaggtaagtcctgggcagggcccatgtgtagatttcaagacccagagccttcccattgaggctgcagcattggctttgttctccttctctgtaggtccagtgattgctgggatcacccaggcaccaacatctcagatcctggcagcaggacggcgcatgacactgagatgtacccaggatatgagacataatgccatgtactggtatagacaagatctaggactggggctaaggctcatccattattcaaatactgcaggtaccactggcaaaggagaagtccctgatggttatagtgtctccagagcaaacacagatgatttccccctcacgttggcgtctgctgtaccctctcagacatctgtgtacttctgtgccagcagtgactccacagtgctgcacagccatctcctctctgtacataaatgcaggggaggctctgccctcctccccgaccccagactcaaccatgtccttggcagagttctcagcactgggaatcttggaagcccaatgggtgccgggcagtgtgagcctcagtctgtgccaggtgcctctgcaggcagtcccagccaggcctggactggtcccagagcctcagaggtctcttttgttgctctctggtctttcttccaagctatctttttgggatgggaccagggctttcccagctcttacttttctactcatcatcctgagtctgaggtccacaggatggaacaggatttgtatttcaaatctgtctagactcctgtttctctctgggggccacgttgcttcctctctccagggtttcctccagtacccactctcatgtggtctcacctgtggcccgcctttcccatctgagcagtcacccccgaaggccttgctgggcctctgcacaccacctcccctcgcctttctactgcagccatgaggctgcctcttctgtgcctccttcctttccaacacagagacctcaaaggccatttcctccgccctgggctagtgccttcctttctgcagtggtcagcttctacctgcacttctgatctcagcatgatcagcctctcctgctggaagcactccctcaactctcagctgaggtcaaatttcagtttccctctcataagctcacagaatcatgtgcctcttagtaaagttcagcaccgttgcaatttttccaacacttgttttattccttttgtgctccacttaattttaaactcatgaagctgaaggctgagcttgttacattcaccaccagcagtgcctggcaggcagggagtcctcattcatttcacagagaatggatgagtgagtgacaggtgagtgagtgatgagtgggtgaatgaaccagtaacaggaacacactagattcattgtaccctggcagaggtctagagttaactttgcctgagatgctctgttatgagctcatcaaggagcactcacttgttgaacaagcataggaccatgcatggtgcaagccagtttgtcagtctgggaatttccaatttaaaatatgatgtgttcttcaagctgaatgagggtaaactttctgtatataattataatatctaagccatttcttaaagttttgggttaggaacaaaaaacccctgaagagggaacatttgtagatttaggatttttaaaatatatttatattattttcccttggaagaacaggatgggaacagccttatagttgctaatttgtggagaaggcatcatataaaagtaagagaaaatcagaattgtgttctagagggtaaattgtggctgtcctgagagcatgttccccaggaacctaaaccgtgagcatgttcaggaacccagagtgcaacagacaattcttggccccatgaatttggtggtaagactggagacagttggaaaaaccatggagtcttgaagttcttcactctcaatgcaggcctctcttgaacaccacagactaatgtcagataaatatgcttccactattaagactattaaaacaagaaccaatgaagagaagtgagcagaaacaataagcaattgaagtgtttgaagacaagaaatttttaccattaaaaggtatgaaagtttgtagaactatgtttaaaggaaattgaaatgtgaacaagaaaaaaagactgacagaaaccatcaagataacattaaaaaataatcaaattcaatacagaaatgattaagattatcactgaaaacaaaatggaaatgaagaaagatgaaatgcttctaagagattattagtgatgtcaaggacagagctgaagaagttacatagaatgcagcaccgaaaattaaatatgtaactttagaaagagcttaagggtggtttccagcatagtagaatatataatttttaattatatatatttatttatataaagttatttatatttatatatttaattatatatttattatataaaaatatataatataataatatagaatatagaatatatattctataatatagaatatagaatatatattatataatatagaatatagaatatatattatataatatagaatatagaatatattatatagaatatataaatatatatatttcccatttttcttatagataattgaagtttcagaaaaagaaagtagagggaataagtgattgtgatgagacattagctgagaattttccagaggtgtttcaggacctaaattctcaatttcaagaattcaaatgaatatgaaataagataaatgtttatattataatgagattgtggaacataagtgacaaatagatgattctaaaagctgtcaaaaagaaaagataaatctctcctagtggaatagactgaaaaaatcaatgaaagaaagaggatcagaaataaccatttagtcggaattataatccccattcattaaacactgagatggaggaaaatatatttacaagtggaaaaattaaaaaaaaagactatgagttttccaataaggtatcttttctgaattatagtcaacaaaggtgggaagtggtcccagaagaaaggcatgaggtgcagcttgtgagggaacccatgtgttgggacagccccgttgggcacgtgtgactgggggatggaggaggctggggcatcaatggggatggcataggggaccctgacttgcagaaaagacaatgagctcatcccttggtgccttgtgttgggggcgctgttggcacatcctagagaacatgcccagcagacagaggagcgcctgtgtggtgaggagataaactcagaaatgcagcatgaggcctgtagctccagacagctctagagcacaaagtgaagaccgatgcattgatgttgtttaaaaggagctaataaatatctaaagcagtcatccaagtgtgttctaatataaatcctgtgttcctgaggttgtggggattgagagaggaagtgatgtcactgtgggtactgttctgtgtcaggacaaggacgtccctcctcctctgctcctgctcacagtgaccctgatctggtaaagctcccatcctgccctgactctgtcatgggcaccaggctcctctgctgggcagccctgtgcctcctgggggcaggtgagtcctcagacaccaaccagtctcattctgtgtgtctgtatgtgtgtgtgtgtgtgtgatgagtacaactgttttcctcatcctgttctcaacttgtgtctccgcagatcacacaggtgctggagtctcccagacccccagtaacaaggtcacagagaagggaaaatatgtagagctcaggtgtgatccaatttcaggtcatactgccctttactggtaccgacaaagcctggggcagggcccagagtttctaatttacttccaaggcacgggtgcggcagatgactcagggctgcccaacgatcggttctttgcagtcaggcctgagggatccgtctctactctgaagatccagcgcacagagcggggggactcagccgtgtatctctgtgccagcagcttaaccacagcatgacacaatcgcctccttcctgctcataaacctcctcctctctctccttgcttccttatgatactattttgcaccaggggatcctcatctcacaccactccactgcctcttccagaatcattgcttgcatgtccgctgctcagatcagcagatgtgcgttgtatatgttaatcattttctgtggaaggctcgttgctggtcttcattatccatccttattttccacattggatactgctcccttcaagattacttgttgcctacaagggatcctactttttacattcaaattttactttttattaatacgtatttgatgccatcttgaaggcaatctcattatcatcctaatcttttgctaatctttatgtttacggtaacattgattgttattttgggggacatgtatttcatctttggtaatgaaatgaaataactatgcacttcaattcctgtatgttctgcctacttaagagtaaatccaattttcttccattcctcccattctatcccactccctttatatgatagttttaagggagaaaatattaattagactctaactgcagctatgtgataagagttatttagaatgagggtgggatattaagctttgagtaaagcaatagtcagggttagaactagtgttggaatcagggtttagggaagttgctcataaaacctgcaggatgacacttctagaatagtctctcactcactctgcagacacttcccagcatcccttgggccattgcaaaagcaatgatgaaacttcacgtgttggccacaagatggcactgtggtccactgggatctaagggactctggggagagcctgggagagcagcctaggaagggaagggttaagaaaaattagggctggcatccaatattatgcagatgttgcagcagttttcagtcattgctaggctacctacagctatgcaagatgcaggaaatacctctaatctttaatgagatccacagttgaagaattttggcctggcagccttggtgtcaagcgcaggtgcaagcagaggagcaactgcctcaaaggaacgtgggaaagctaggggcgggctgtgccctaagctcagtatgtctctgctgcaccccatcttccctgcagacctcgccgggcaacagccttcatgagaggaggtggatcctgcctgagaccagtcagaaggccctggaccagctggactccgtaggcatggggggtgacaccacaggcccaccagactattccctagggagcagcctccaagccccagctcacagtcctgaggatcactgcacttagttgggccagcccctcctcactctgaccctaccatgaaccccaaactcttctgtgtgaccctttgtctcctgggagcagataagttctggaaacagctgcaaaaccctgtaatgggtttgcaatgtctgggctacaagccttttttgtcctttcctctgcagagtccccttatttcttaagtcttgtcttcactttctgtctgcctctccagcaggctctattgatgctgggatcacccagatgccaagatatcacattgtacagaagaaagagatgatcctggaatgtgctcaggttaggaacagtgttctgatatcgacaggacccaagacgggggctgaagcttatccactattcaggcagtggtcacagcaggaccaaagttgatgtcacagaggggtactgtgtttcttgaaacaagcttgagcatttccccaatcctggcatccaccagcaccagccagacctatctgtaccactgtggcagcacatccgcagccctgcacagccagctgccctctgcacaaaaagggcagtcacaggctggaggtgggcactccttatggaagcccgtgtctcaaccagaagaaaaagctgccctttctgaagctcttcccagacttcccagcaatgagatctcattctatgtgtgctcctgcagcataaaacttagagtgagctgggtctgtcactgtagtgcggatgtgtaaatgcaaacaacgtaatgttattttgctcaatttggaatattctggtaattgtgcaaaggaatggtagcttctaacaagaaattcatatttcactttcttttcaggagagaagaaaaaagcagaaagcagctgggaagctttagcctgcttgagtgatctgggattctcaagtagcatacataacatcaccttggctttggttcctttagataccaagcatgtgttctgtggaggacaagaaaatccatttttttttgttataaagttataaacacacaagagaacaatccagttagggagaatgttaataaatacaacaaactctgccattagacctgaagataatcagctagtagaattatcaaagagattgtaagactcttactgagtacctgtttgaggtcctctgaggatagatgaaggaaggaacttaattcttaccatcactgtggcttggattagaatccatgagttccttaacttgtttttcttgtaaaatattataaaataatatagaacacacattttattttcctgtagcctgtagtcctctttagcacctaaagggagaagcgcatatcccggtgcaaaagggagctggttgcttgcttggcaaaaaaatgaattcaccaattggccaatctgctgaaagtcaaaatgaaaggctaatatatgagactgatgacagttcatggttcttggtataacttcaacagcgagtgaacatttttttctttgtctatagctttctttcagccatcgatcctcagttgtgtcttagcctcttatcagtccagctcactttgatactaaatttgattgttgtgtatctcagcaagaagcacgtctcacattctctgtattttatgtggtcatgagtgtgttcctgtcttattcttattttatgtggtgcatttttaaataggactgtacagaatacaagcatctatttgtatatgactctcatcttttatggggagaggtcagagtaggtgagcgtgcactttgattctctgctggaatctctttggattctatgtcccctgtcacatggtttattttcatatgcatatttctcatggttctcctgactcttttagcaatgctcattgcaggatattagaaattgtattacttctaatggcagaatgttagaaattgtgttgactcttaaggcaaaataaaatacccggactcacctttccattgctgtgtctattagtcgtggtcctggagatatcaaggagggacaaaaggagtatttgcaaaggtgtggcagggttaagggaacccagtaagagaagtagaagtagcctaagaacagcagaatctgtggctcttattcacattggcctgaaataagtaggagaggatgtggatcccaaagcatcaggtactgtagctctaaggcaaggctgcctataaggtgctgtggactttggtagggaaaagtaacctatataaaataatgaagcaagaggagagccagggcatagatgaatcagaacaagtggtgcccctacctccctctactctcctgccattgtctcccattagccaaactcactctggagttagagaagaagagagccagttaacataatacactgaggtcagcctctgaaggcagggtggatctggagaaattaacgtaaattatccagatcactacgcataagatggccttgagggtgctgaatcccaaactgtctggctaggtctgtgctgtgagctgataaagccctagtgttatttctggggaatctgtactcttaataatttacagacaaccaaggtctgctttggatctgatcagatagactaaatcttggggactttgcaccactggccactcaagggaggggctggaaatattttctgaggacaaaaaaatagaattagaaaatttggttgaatctagcgtcagagagatgacattaggacagccagggagagctggaacaagaaggtttaatcacaggctcctcaccctctgctgatgggcaggtgtgtgagctccagcatggagcacgacagcactaggtgggaggagggtgagagggtgatggggcagcctgggagctggagcagtgtaggcagaggagcaactgtctcatcacagaagcttctgccctcacccaacccttctgctggacagggagggagttcaggttgtggggagtactggacctcaggaagcatttatagggaggacacaggacagtgacatcacaggatatcccacccatcaggaaaatcaaggcccagaactcacttggcccttccccaggaggaccaagccctgaatcagatgcagtgctgcctgccccactgtgccatgggccccgggctcctctgctgggaactgctttatctcctgggagcagatgagtcctgtgcacagaacagcagccccattctcagatttcccacccctgtgtcctccactttacactggggaggacctccaggctgtctgctgtgctcatcctccatctgcttttcccacaggcccagtggaggctggagtcacccaaagtcccacacacctgatcaaaacgagaggacagcaagtgactctgagatgctctcctatctctgggcacagcagtgtgtcctggtaccaacaggccccgggtcaggggccccagtttatctttgaatatgctaatgagttaaggagatcagaaggaaacttccctaatcgattctcagggcgccagttccatgactgttgctctgagatgaatgtgagtgccttggagctgggggactcggccctgtatctctgtgccagaagcttggcacagccctgcagagtcactggaactctgtgcactaatctctctgcttccgtgtacagcagtctcagaccagacagctgtgagaacctggggccttcagggggaaagataaacaatttcaggactctgaacaaggctggcggaaacaaggccaggaggatatgctcagaggatggtgctgcttcaggaggttcacggcaaaattactttctttgtcggatgctgtacactatagtgatagagtagctggcactctcctttttagaaaaagaaattcattttggtgtcaggattgttcgacagatgtgtagtatagaaggtaaaatctcaagggtttgctttatataattaagggagaagaaattgagatttggtttggagaaacttgaggagagagaacatgattaaagattattaaataaatagaagtagagctaccagatgataaaaaattgtgttctctgcaacataacctgtcaaagttttcaattgctagaaaatacgcagcaaggccttgtagcaactggcatcaccccgaggccactctatgatggtcatcaccacgtagccagttgccctgtgggagggccctggagctggttccaatgtcttccttctggacttatatctcaattctcaaaacagaggaattcatttcactgctgatggtaaacagataaaggctctcccatttccccaaagatacattctgcttcccttgtatctctttctgacacttaccgcccagatccattaccttctgtgatcaaacacctcttcgaatatttcctaaaactctgcagcctttacattctctgcatttgtgctcagtatttccatggcctggaaggaccttctgtctcccaagaaacagccagaccctgcttatcggtcaaggatgggctcacacctgcttcctctttgcttcttaccatgacattccccagcattgtactataccaccatctttattattttcataggaaaagccaagtattaattaaatatataatgaatattatttgatgttgtgaaatctatgttaattcctgcttatatagagttctggaatattattacttttattcatgtgagggatattattaaccactaactatttcctggttagagatcaaagtcacttctgtgtaatgatagcaaatgtgagaaccagctgaatctgtttgaattacagctggcagtattattcatttcaaaatttttataatttagaagtaaatttttaaaatctagaaatccttttgtgaaatgcactgtctaaaatttagtaataatgaacctaaatacaaaatatgaaaacatatgggtgtaattaactgggattagctgtggaatatagggtttccaggctgggtttccttgatagcatcacactgtttaattgtatggcctttataattctggctggtctctaccatcttaacatattatttgcaattatgtaacaattgtttattttgtaatcaaaatgttggttcatgtgtcctttgactccattggctaagggtagatttgaaaatcaaccctaaattgactcttctgggaaagcatggacggggtgtgtaagagggtgggagtggcaggagtgggggcatctctctttctgatttggacaatttgagcatatcacgtcagagggtatgaatccatgagactgtagactgttggccacttggaggcgctgtggctccacagtgctgcagagaactcagcggaggggtgggagagtggccaagagaggaggactgaaggggatgccctggctgcctgctggcatcagtagagtggatggaattccctgagtggggcctggccatgtagagttaagcacagactatcattgccttgaaagagttggggtgccagaggcctcagtttgcatcaaggagggagtgtctctgctgctgcacgggcagtggagggtgaaggggctggggtggcaagggctggggaatcagtgtcagggcagggacagggcgggcagaggaaagtaaggtgtgatgtgggtatgttggtactgtgttcagtcctcctcacctttagcttctggcctgtgcaagacaggaatagtacatggagtagcagaacctgaggcctgccaaagagtacagtgggctggagtggcctgcaggggaaagtatgtcagtgtggtgacatcacaggtcaatgctcctatcaggaagaagggagcttaggaacttcagaatgcttactacagagacaccagccccaagctaggagatcctgccatgggcttcaggctcctctgctgtgtggccttttgtctcctgggagcaggtgagtcctgggcacaacttgaaagtctccgatcttcatttcttgtccctgaaatgcatgtgggccaacgatggcttcagcaggaggctttcttctgtgccttatggttaacttttgtcttctgacacacaggcccagtggattctggagtcacacaaaccccaaagcacctgatcacagcaactggacagcgagtgacgctgagatgctcccctaggtctggagacctctctgtgtactggtaccaacagagcctggaccagggcctccagttcctcattcagtattataatggagaagagagagcaaaaggaaacattcttgaacgattctccgcacaacagttccctgacttgcactctgaactaaacctgagctctctggagctgggggactcagctttgtatttctgtgccagcagcgtagcacagccctgcatgagcatcagccttctgtgcaataacattcctgccccactcaggaagtgacggtgaggggagggctgccagccagaggggctcaggccctggagagtggacaggcctttcccaggcactctctggtgcttctgtatgtgatctggtttactgctcactgaagctgtgtaagcgaaatattattttacctgtttatatatctgagggacagcagatgtcctggggctcatatttagtagctagctgaagtctattgtttcaacacctctgcactgtccctcctcactccggagatctgtccttttacctggtgtcccctttttgtgtccccaagagcaggatgctaaggtcatatatgaaactgtgatcatgataacttgttccctgacaagtccaatggacacatgatttccaggcaaaacatatccatctattctttattgtgatttaaaaaaaaaagaaagaaaagaaaggtgcagttttctgctctgtagccctcctatgggcaaggccaggtcatctcttttatggagactgtatgaggagggagctttcctaggttcacagcaaatagcaggaaacgttttttatggggcgtgtagtcttcctgtggcggatgcaatctgccatcagtgaaaggacatgaaaaattgttattcattagttaatattttttattcttttttttttttgagacagagtttcactcttgttgcccaggctggagtgcagtggtgctatcttggctcactgcaacctccacctcttgggttcaagagattctcctgccttagcctcccaggtggcctccaccacacctggccagttttgtgtttttagtagaggtggggtttctctttggtggccaggctggtctcaaactcccaatctcaggtgatcacctgccttggcttcccaacgtgctgggattatagagccattgcactaggccaattttttattctttatcaataaatcttttggggcatcctactttgtacaagggattatatcacatgaaatatacaatgaaaaaagataattggaaaaaagggaaattttttaaaaatgaagaaaagggtgtttcttgcatttgagggtatcaaagtctgtaatttttggtatattctaattagtttactcagtttctgatttatacgaatttcctctttcttctctttctctctttggctacctacacacttttgccagattttttaaagtttttagtaacaatatttaacatgagatctaccctttttatagacttataagcacacaatacagttttatactctgtagtcataacgttgtacagcagatctctagatcttattcatcttgcatgattgaaattttatacccattggcagcaactccccatttaccccattccccagaccctgaccgctaccattctagtctttgcttccatgagttggactattttagataactcatgtaaatgacattatgcagatttttgtctttttgtgattggcttatctcatttagcctaatgtcctaccaagtatagtggtgacagttttacttctatcttccacagttcactcgaatagctccttgaccaactgtaacccagaatcataaagataaaggcattcttagaaatataacttcttgtcctggctaagttaacttaacacaacccggtacgggatggattctcccaggttgaggcatctggtcacatacgagtttcaacctatcatggtctccaggatccatttttggcggcaccactgctgcccaggtgactgtggacacaacttagatgtctctgtcctagattttccaggccccagctactggcttttcttttaacctgtgccggcagtctccctccactcagacgcagggatctgcctcctgctcccatctccttcctgaacttccgccctgctggagttgcatggatatcagggcccctggtcaatgtgcggcagcccacggaggcactgggagggaagctcacctctagctgccttctggggcccagttctgttataccccaagcaagtgctctgttctccctttgggctccacagtatgagaaatgcacttcatggattcatagctgacccctagctcagtaatctgatgacaaactttgagtttcactcaaagtgaaactctcagagctgagggactagctctgcatttctctgatgagggtaagaatacagtgctgtagagatgccttcttccctgtgtagacctggcactaaacaggaaaaaccagacagggtaaaagtgcccaaatatgtctgagaagactgaaagaaaatttcctaagaaaatccttctcctgacttcattcagttcctagtaagacacacctcaccctctgacccccatatcagctggtccccccaggatatcacacgtcctagtatctaaccccacagcaactaattcagatactggcctctttccaacctccagaaacggtcttgccaatagagttttgttggccgggcgtggtggctcacgcctgtaatcccagcactttgggagcccgaggtctggtctggtcacctgaggtcaggagttccagaccagcctggccaacatattgtgaaactccgttccttccaaaaaaaaaaaattacaaaaattagctggtcatggtggcacatacctgtgggaagctgaggcaggagaattgcttaaacccaggaggcagaggttgctgtgagctgagatctcatcactgcacactccagcctgggcaacagagcaagactccatctcttaaaaaaaaaaaaaaaagagttttgtcctctgaccaccaggtctatctagatatctaggcagatttaatttacgattaatttgacctcttaatcccattaaagggagaatgaagagcgtatggtttcaatgtaaagtatattcattttattttgaatgagttggaactaagtagtaaactgaggatatcactccattatagtcttaaaacaacccatggtaaaacaaatctctttactaggactttctttttcacattttagttcctagttacccagagtccagaatagttaagagttgaagagtcatgactgagatggtctgtgggggtttataaatgagcattcacttgttgaacaagcctagggccactctctatggaagcagtttgtcagctggtttgggaatttttaatttaaaatatggtacgttctttatcttgtataagtataaagtctacaaatataatttgcatatataggctagtgcctgaagatttgggtaggacaaaaaggaaagaagagataatatttgcagatttaggaagtttcattatataaaacttcaagggctcaggggctctaatttgtgaagatagtataatgaagaagaattagaaaatcagaactctcttctggagcctacactggggttgtcctgagaaaagattatgatatgaggaacataatccatggtgtgcttagcagcccagagtgtagcagacagttcttgactcatgcagttgggggggtgagactggagacacttgtggaaggtactggctgttgaggctgtgctatagcctctccaaaaccccatagatgaatgtcagacaaatatactgccactatgaagaatattaaaagttagcagaattcataaacactcgcaataggcagcctgaaggtttaaattttagcatcatgacatatgacagtttgaagagctgtagttaaatgcacacaaaagagaattgaaacctgaacaagaaaaaagagactctcagaaatcattagataacttttttaaaagcattgaatgggatgtctagaaatgatccctaaaatgactgaaagaaagcagataaattgaagagcagattaaatgctcattgaagagattattattgacttcaaagacaaatcttaagaagttacccaaaacaacacaaaaaattaaatgtataatatgaaacagagaggaagcaacagagaagaaacaatggaggtttcagttatattcgaatatatgtaacatttcataagaattttccatttattcttatgtcattgaagtgtcagagaaagaaaataaggagaatgatatgaggtgatattgtgtgtgatgctagctgagaaatttccagagacatctaaagacctaaaacgtgagtttcaagaattcagataaatcccaggttaaatagttacctcagtgttaaaatagaagaatatgaatgatgaagacacaatttttcaagcagtccaagaaagacaaatatctcgcaaaggaatagactgagaccgacaggaacagtgaagaaagggagttaaaaatatctataaatgcagattatagtcctcattcatcaaagagacaaggagacctcggcagttcatattctgaccccttgggctggtgacctgaaatatatttggctgagtgttctcatttgtaaaccgaattcaatttgcagagatttttttttttttttttggaaatagagtctcgctctgtcgccaggctggaattcagtggcgcgatctcagctcactgcaacctccgcctcctgggttcaagcaattctcctgccttagcctcccgagtagctgggactaaaggcacacacaaccaagcccagctaatgtttgtatttttagtagagatggggtttcaccatgttggccagtctggcagagatttgagagaggtaactttaaaaattagagtcatataaagtgtaggttcaagaaatcttaggtccctataaattctctgacaaatctccaatctagcacagttatttactctctgaaattctggtaacaaagacaagcacagattacttttgcctgattcaatcatgtttcagacacaaagtcatctaaaatgcaaatatagtagtctgatagttcattatgtaaaattaacataaagagttgccgtttaaggaaatatgcaaatgttacctcttatgaacttcctgcttgataactgagtctgatgtgcatgaaggtgtggtgctcctagaaagatatggcttcagtgcaattgtccatcacacaagagagctgatagaagaaggcacagctttattggaaagaagaccacagaggagcctctagtggcttccatgacatcctctccgcccacctctgatttcagccttgctgctgtggacggtgccagttcccattcacctcttgctgacagtgcccttctgcagtgcctgcttggaatgttgctgcttcctgctctggggtcttctctggtatctgaatccacttgggctgtattcaaagacagccagaggtcctgatgctcctggtggaacaggacagggggacaaaagctccaacctgcccattcatgcagatactccagagagcaccctatgctcttggaggtcctgatggattccgtctcctgttgccccagcacaaatacaatattgcacctttatcctggtttctcccttccctattttgttttccttgctctcttacttcttcctggaatcatttcccaaataagctacatgcacccaagtctccccatcacagactttgtcttcagagacagactaaactgtggcagtgatggaatgaagcgaccatcaaaagaccctaccttttgaaggagacaactgtttatcttttattcatatggctacccattcatttaaaaagtcttatgatgatgtatataaactaatcttttccaaatccatttggattcatctggaattcccagcgttctcaggatggctctctgctcccttaaaacttcaaacctattttgaactgaataaacttggattctgtttacagaagtagaatctgcctggactcagataatcattcattcctttcttcattcaataaatatttaatgaattataggtgaagattagattcaagttttgtggcgcacaaagctgatacattttaggtagctctttgcaaaagagagtgcaaaatagcaaagagttgaaaagaccctgtgcaagtgagaaggcctgaggttattcttcatcggcttcatggcaaatacacaggtactgtccaggtacttgggaaacaccagtgcaaaaaacagacaaagcttcaagttgaggtagacaattttaacacataattgttataatttattatacttaataataaattaatttaaaagtagaaggatatattcctggtagatgcttatctccccggagaagttagagtgtcattgagaatatcaacattcttggtaaatcatacctgatttagggaatgatccttggagctctggaattctacatgccttaccttgcaaaatgaaggtcctgatctgaaaagttttttttttttttttttttttttttatgccctggcccaaccatgaggattggcttctttgctgtgtggctcttggtctcccaggatcaggtgagttctgggcatagatgagaaagtccttcctgggcttgtcgggccccaaccacggcctcctatgggggtgctcatgggcctcctccctgtctccacttctgattctgtgtcctctctcactggagcatgattgtgggaattacccatccaggttgcatcaagatgtgcaatagatagcctattgtatctgaaataactattgcagtgttatggactacatgtgagttttgcaccatagcacgtttacaaatccatcaaccttctcccatttggtgaatataagatctgctggatgggaatagaggattttcctgtgaccctagagactccaggtaggtgtagttcttggtgaacatttcatccatattcctaatgagcctcctcttttcttcacaggaagtacagtcactcaggggacttagatggggcagtgtttgtggcttcacctgaagcaaagggagaaaacacccccatgagaatacacagcagcctgagcttggatggtgacattcccatcaggtgtaatgaggtgctacagcatgtaacaagtcttcaagcggtcatgaccttgaacctggaacttggaacttggagacatttctggatgtcatttaaccgagggtatccctgtatgctggcatacaagtgtccagaggttaaacgaagaggaaaataattcaacttggagttgaattttgtgcaggaagtcataaaagtcaccaggactgctatgacaatgttctttagcctacagaaatattcataaaagtgaaaatagtattcaaataaagaatttctcatgatggaaataaaatatacatagaagaacaaattcccctattaaaatcagggaaagagcttaggagtttattagatttctttcaaaacagacctaaaaattattcaactctgttataaataatttgttcctgcggggaagagaaggggcatggcaggttagctccgcagttcaagcattcagcaggaacagtgacatcatcaagtcactgagagcccaacttcagtctgcccacagcagggctgggagacacaagatcctgccctggagctgaaatgggcacgaggctcttcttctatgtggccctttgtctgctgtgggcaggtgagggctggtcacaggagggcctccttccctggaattcccaaggcctcagtgcaggcttttctgttgggatgacagcatcagcatctgttgttctctattacaggacacagggatgctgaaatcacccagagcccaagacacaagatcacagagacaggaaggcaggtgaccttggcgtgtcaccagacttggaaccacaacaatatgttctggtatcgacaagacctgggacatgggctgaggctgatccattactcatatggtgttcaagacactaacaaaggagaagtctcagatggctacagtgtctctagatcaaacacagaggacctccccctcactctggagtctgctgcctcctcccagacatctgtatatttctgcgccagcagtgagtccacagtgctgcacagctgcctcctctctgcacataaagggcagttagaatgactgaggttgcctgtgctcccaagtcccagccttcacaggagtcggagagccctggctagcctgggggccatagagcaggggccatataaaccttgatgttgaggtccattcctaccccagtctcagaccaactggaggtcaccccaacacccttagcttctgcagttccctctttccttttgtaaaatggaaaaggcatctttagtcgagattcctaatttcgttgaaaatttgaaacccaccatattcttctctaccctaagggctgggtgacttttccacataccctttcccctaccctctactgcctttcaactcccaatcataaatctttgcccatgtggtctctgctcctgggggccctttattctaagggcaatagacccacgaggtcctatatcattagccatttacgtacctcttcatcatcattttgcaccatgttttccctggctctctgctccagccacactcccttacatgcagttatttcttcatatgtgtctgttgttttccaccctggggattgtttatataaattctttcttctgcactgagcatacataccacccacttagtcctacatctctacttcatttcttaaattaaagtgtatttcaggcacacttgctcttaattgtaaaaagcaaaaaagaaagtttactagaaaaatttaagaaaagcattttatgcattcagttgagggatgacatttttagaggagacaaaaagccacaagccaaaagaacaacattcataacgctagttgcattaaattgtttcaagccaaaacacaccataaaaaataaagttaagctacagcctgggaaaggcatgaggaatgcatacaaatgatgaaaaatcagtgtgacagagaacattcagtgtaacagagaacattcagaacatcactgaatacctgtagctcctccatggtttctggtctcccttgcagttggaggggtgggaacatgtcaccaggttctgaatagtgggataaaatgatgtcagctcatttcaagcctggcccttaaaaatattctgtggcaccatgttgagggtctctaaatgtactcccatgtttagagtgttggtatatggcatagagttgtactcatggctaagatttattaaagtgtcatagtaaatactctgcagcagaacatgtggagaaaacacacaggcagaatctggaggaattcacaggcaggcttccttatgctctcttcctctcaggaggggtcacacagagctctctctcctcccagcagcaaaaatgcattaacacacgtgcagtgtatctgccaagggagcccattacagacttagcacccaagaggttttagtagaagctggtcacacaggcacctactttttagcatgaaccaaaagtctagatcccaaaagaaaatctgatgttcagcataatattatttgcaacaccagcctaggaacgatgagccacccctgtcagtcaggagaaactttgcatcagttcagggcaccgttcaccagccaagctcccagatgtctgccagagtccaatcttgcaagcaggactttctaagcaccgcagtctccagcctcctgtcaactcttgtgcacagacactcttcaactctcttttgccatgtcctgaactcgggagctacacggtacagattgcctaatgataatatggaagcagcctggctcactgagtcagaatttggtggacaatcacagaagaaagctgctcatgccacactgggctttgtggtcatgggaagtaagacttcatagagctatgccagtgagattttaggatttgttttgtttgttttgttttctgtagcacagctgttcttgtctaagagaattagtatctagaatgagtaaaatattcttattacttagtattaagaagacagctcaataaaaatagcaatactgaggctgagtaggcaattcacacaagagtgaacataagttaccactaaacatgagaataacttcgcaaccttacttacaatcagaatattgcaacctgaaacagtaagttatgatttcaaaattactagattggatacttttccaaggaatgacagtcctacatttgagtagacatatgggctggtgaaaattgtttgtatatttattacaaaagataattacaactacatcagaaaacccactgtgggatatattgtgacaaaccacatttctggaaaatttatcaacgtatttaaatcacttgggttcctttcattgtctttaagttcaataatggagaatgcaactgtcagtgtttttcctattttgaaggtagtctttccatcttttaaaaagtatgataaaatgcacgtaacatataatttcatcactttattttttaaatgtacaattcaatgacattaagtacattcaccttgttgtggaattatcagcattatccatttccaaaattattttcatcaccccaaacagaaaccctgtacccattaagaaataacttcacattctccctcctctggcaaactctaatctattttgtatatgaacgaatttgcctattttagataatgaatttacatgaaaccaggcactatttttccttttgtttctggcttctttcacttagcataacgctttccaggtgtatccacattgtagcatttattagaacttcattctttttcattctcaataatattccattgtgtgtatataacacatttgtttattcattcattagtcaattgacatttgggtggtttccaccttgtagatattgagaacaatggtgcagtcaagactggcctggaaatatctgtttgattccttgttttcaattcttttgggtctatacctaggagtggaacttctgggtcctttggtaattctgtttctcgttttgagtaactaccaaaatatttctttgttgcagctgcacgattttggatttccaccagcagtgtccagtttcttcacaacatttccagaacttgttatttccttttctttttcttttttcttttcaaaaatatgatgatgatgattactgtttttatagccatcctagtaagtgtgaatgatatctcattgcggttttgatttgcatttccctaatgactaaagatgttaagtgtcttttcttgtgcctatgggcaatttgcataccttctttgaaggtaatatttattttatttgattgtgtttttagagtcgctattgactttagatttaagctggtgtacctgtgatgatactaaaggaaattgagattgagattaaacttctcttgggcgatttgttgttggctaagtgtttttaggtgcagtacttctgagacattttgggatactgtagagagagaaataagtaatttattgatatttctgggaattagattttttttacaaagagaagagagatataaataagaaacgggaagatgaggaagaaatctgtggtgctgacttgaattggagttattaatgcaaacttaaggttttaaagattatatatttcctaactttatccagagaagggtctaaaaaacaatacaaagtaaataaacgaatggctatatttgcttttttttgtgctccccagtaacaataggtacattattttattccaaatgttattccttataaaaggctgcttccatatcaagggaaggaaaagtgttagaacatcttttggtagaaatcaagaaaaaggtcagaaccaagaagacatgtccaaaatccacagaagcaatttcaaggggctccattagccaaatccgggtcaatgcaagctttaaagaagaataatgaggatactgaattgtaacaagttataaaaatctataaggctataatgacaatcaaaagagatagataagaatctcttcattacggaagaatgctagttgatatatctaatgagaaaatcaatgcaaccatccacataattatagacaaattccattagtagatgcctaaactaacagtttttgtttccttcaatactttgagttatactgttctactctctcctggcctgttgggtttctgctgagaaatctgctgaaggccatactggggctcctttaaatgtgatatgtttctcactgcatgctgcttttagtattctttctttgtctttgatttttggtaatttgattatattgtgtcttggtgaactcctttttgggttgaatttgattggcagcctccaagcttcctgcacctggatgttgctgtctttcctcagatttgggaaattttcaaccattatttccttatatatgtttttggggcctaacagcatatgtaccttgtttcaaagcatcaatacacagattattacttaattacaaagggtaaagggcacattcacaatggagagatcttggatcagtcatctcaaattaagcattgccaaaatgcataaaaatgacattccatattcttgtgattgaccagatgcaatgggaaatagacatcatctatggtgtatattttccaagtaattaacctctaataatatgaaaatttttatcgtgagctgttttacaagtaagctgaccaggacacttcaaaaatctatggtcatgaaaaacagaaaatataataagtgggtggaggagatgtatcattgaaaagtaactaaagagatccgacaacttcctgaaatacatgatctttgatattgtcccagaggaaaaagtaaatcaaaaccaagggacatggttttggtggggacaaaccacggccaaaccgcaggcggggctctggcaagacagtaggaatagatggagttgggaggaactccccccagtgccgcgcaaacactgtccaatattagccctgattctactgaggacagtgtagacatggccccagtatttctgacccatgaatggagggcctgagcctggtaactctgaaccattcattgaccagcaggcggcactagggtttgctggggttggcttgcttttaaatcagggctcagtgctgtctgaggagttaagtttaaaggaaaagtgtgacttcatcccagcatccagaatctagtttgcagatgtttgagtgtcctgtggaatgtgagccattaaacagaaactcttcatcttccagcaatgccagtatcctctgttcagcagggaaaccccaactgtagcaaatcattgagtgaataatgttctgggcttgcatcagggatagatggaggagagccaggagccagcctgcatgctcacagacccatataaagggagaaccacttcctcctcaggagaactcagagaaaccttagcaattcacctgtaccccacacctaacccattccagttgtgccctggatggtggacaggaggatgtaaagggaacataggagaggggagtggacaattccagacctctccagataggcttagctcaaataaccttgcaaatattctgaataagagccagatttcccagggctctggccttttcttccctgagcagcatgatgatgctccattcctgtcttgacaaggattctgtcatggatttcttggttgtgctgcccaggaagcaggtgaggcccaggaacaatgaggaatgtcgtccctggacttggcatgcctcactcgcaagcacaccatatgtgggtcctgtgattgataggtttgatagatggatacgtcctgtttccagccaccagcctctatcccctgaatgctgttgtcaactcagagccacaactctggtcacaaagatggagcaggtagtggcaccttaatgtgaagaaagtttccatcatgcaattgttacctggtgcctacatgagttagactcaaaccagcagctgtttacctcagtgatagaggatttatgacagaaacagagggctcttgtaattctatacccacaggtattcacctgataaccttcacatgtgtcccctaggttttggggactttgagcctgcctcactgaacacatatatcctcgttcccagctctctggacatgcatctccttgtattattgtcttatgccaactctcaggtgcttcatcccctaactcttcccatcctttaccccttaggcaatgaataaaagtatatttgtgactaatgttgccccattagaaaaaaaatgccagatactagccactgctgttcaattgtaacttatactaaatctgtaaggtttttttttttttaagatttcaacaaatctgattttagatttcttttttcttttgttttgttttttgagacggagtcttgctctgtcgcccaggctggagtgcagtggcgcgatctcggctcactgcaagctccacctcccgggttcacgccattctcctgcctcagtctccagagtagctgggactataggcatgtgccgccatgcccggctaattttttgtatttttagtagagacggggtttcaccgtgttacccaggatggtctcgatctcctgacctcgtgatccacccaccttggcctcccaaagtgctgggactacaggcgtgagccaccatacccggccgattttggatctcttactgtattcacaatgatattttcagggataagagagtccccacccatcttataagatatcagaactttcattacattgatgaccaagaaccataggcagaaccatgatgaagacttggtacacaatgcatcatgaagcttgataacagaaaagagaaagctggccattgaccttcaccaaaaatgaacccttccaactctctctcagggtattattttacccctttagcttagagcatgtcagctggttcaacatgcttctaggataaacctgtgtcaactaccccagctcccactctgtctaagctcatagcaatgagaaaatggagaacctggtaagacagaaatgcccagagagaaggatatacagataagacatagaggttactaattgttgtctgtattttgagttgcctttgacacattcaagtagaaacatgcagcagaagatggccctggagatgcagtgggtgatccaatcccccaagccctagagatgtgagtaaagacacttggatgaacttacacacagtccatgaatacgctaaagcaacttctagctctgttttagttcataacaactggtttctaagaacttaggcacttgtggagacaatgatgttactgtaggaactaccgtataaggacaggatgtcccacctcctctgctcctgttcacaaggaccctgaactggcaaagctcccatcctgccctgaccctgccatgagcaccaggcttctctgctggatggccctctgtctcctgggggcaggtgtgtcctaagaacaccatgatcatcccattggaaattccagtgatttcttcaatcatttctgtctttctgttttcaaattctgtctttttccccaacagaactctcagaagctgaagttgcccagtcccccagatataagattacagagaaaagccaggctgtggctttttggtgtgatcctatttctggccatgctaccctttactggtaccggcagatcctgggacagggcccggagcttctggttcaatttcaggatgagagtgtagtagatgattcacagttgcctaaggatcgattttctgcagagaggctcaaaggagtagactccactctcaagatccagcctgcagagcttggggactcggccatgtatctctgtgccagcagcttagccacagcgttgcagagactttctctcctgtgcacaaaactccagggctctctccgctctactcagctcacagcagcctttccttattcctcatcctctcagggaagaagtgagttttcagatatagctagggttcatatagtgggaggaaatgaactattttcttaaaacatgagcgctatagttgttggttgaaaacatgtcttagggatttgaaacacttctgggtgggaattcaagaaaccaaaactgaaagtgatttatcccagacctagtcctcaggggcagtgatggttgttcttctataaaaaatgcacacaatgttgtacgttaattaagaaaataaataaataaacttgaaaaataaaaacatttaatcaccaaaacgtgtgttaaactttaataatatagatattgattacatgcaagtgacaaacagcaggccctccttctgccgttgtcagcatctgaatgatgtgaatcttatctggctctggagcctcttcttgacctctcactggatgtttcatgcagtcaaatctcaacagacactgtgtgtttggaaatcttttccctctgtttttgtggaaatatgacaataataataatattgtaatgatgatgatgttgatcatttcagctatttcattcagcacactttaaacttcaaagaaatgcacacaaatggttatcctggaaacaattcccaaatcttaactcaaaatgaattttgcttctctggagtgctttaacttttcagtgtaacagacacagcccaacactataattaggcctgggccagctagttcagaggctggtgaagacacttccacctgcctgcctacttccttgtctgcccactaaaatagctccttagtgcattagatattcctgccagaacttcagaagcaatgaactgcccctggtccagttgtctcctctgataatgcactgtgtgtgtccaactctagtctctaccctaacttctgcccagattctcctgtactagaactcattctgaagtactggttagaatgtttgggaaggcagcttcctgggaatcctccgaaggaccatggctgtcagtgattccctcgtaacacttcttgagagcatcttgtatttcattgaacgtaggactcccatttatttcagtctgtctgctcctgttcacctctgagatctctgtggcttgtttgtgttgatttccttttgtgctgcttcttggtcatttgttcgtatttttccttataaacctgattatttttgacatcgtgccagacactatggttgtagaaataatttttggtctaggatggacatatctttctccagagataattttattgtgttttgtaaagtgcatggatacataaacaatccaggactccctgaaaaagaattaaaggcttgaggtgtcctggagcccctggagaacaggtttcctactagttccttgtttcaattcaagttcctcagtggtcaccctcagtaagttctggtcttagccattaccccccagcctgtgaatcagcttcctgagagctgggctgggatcagcaaatgcccctaagggcagtgactgctgtgttcactcccccaggctcctgccttctccaagattctggaccagttgtccctcataatgtttttgggatattaattagtttcagtttttgttagtgtggtaatttacccaactatttaaataataacagaagggttaattttgttacaagaaaggggtcctgatccaaccgccaagagagggttcttggatctcatgcaagaaagaattcagggtgattccacagtgaaaagccaaagcaagtttattaagaaagtaacatggtgaaagaacagctactccacagacagagtagggctttcccaaaagtaacaggaggagcgcatctaccctacgtacaatacttgtttatatataggataagaaaagatcgttgagagatgtgctctgctacaagggtttgtgataaaggattaactttcttaattactatgttttgcaagaatcagtattattatctttaaagagaaattaggaatgtttctgttctcaagatattggggtatcatgacactcccaagtctgggtctgtttagtaaacattattaatctgttgctttaaccataaacatctagaggttagggatacctgattttctgggaatgcagcccagcaaggcccagcctcattttttcacttaagatggagtcactctggtttgaacgcctctgacaatttgagtttcctcttctgtaattactcagatgaaggtcaaagaatttcatttaaagttttaattttctttgaatttcaatgtctgattcttagtctgtgatttgcttgatatttaacttaaatagcatagagaaatgttttactaaaactttaatttcgaggaaaggacttttttaaaaacttgaaggggatttataatcaaattgggacactcacttggttttgacattttatcatttagagtattattatgttgttaattacataaccttcgatgcttcattcgaacagggtaatgagaatagagagtaaatatttaaacttcatcagatctttgacacacctgacaaaaacaagcaatggggaaaggattccctatttaataaatggtgctgggaaaactggctagctatatgcggaaaactgaaactggaccctttcgttacaccttacacaaaaattaactcaagatggattaaatacttaaaagtaagacctaaaaccataaaaaccctagaagaaaacctaggcaataccattcaggacatagacatgggcaaagacttcatgactaaaacaccaaaagcaattgcaacaaaagccaaaatggacaaatgggatctaattaaactgaagagcttctgcacagcaaaagaaactatcatcagagtgaacaggcaacctacagaatgggagaaaatttttgcaatctatccatctgacaaagggctaatatccagaatctacaaggaacttaaacaaatttacaagaaaaaacaaagaaccccataaaaagggggcgaaggatatgaacagacgcttctcaaaggaagacatttatgctgccaacaaacatatgaaaaaaagctcatcatcactggtcattagagaaaggcaaatcaaaatcacaattagataccatcctatgccagttagaatggcgatcattaaaaagtcaggaaacaacagatgctggagaggatgtggagaaataggaacgcttttacactgatggtgggagtgtaaattagttcaaccattgtggaagacagtgcgacgattcctcagggacctagaaccagaaataccatttgacccagcaatcccattactgggtgtatatacccaaaagattataaatcattctactataaagacacatgcacatgtatgtttattgcagcactcttcacaatagcaaagactcgaaaccaacccaaatgcctatcaatgatagcctggataaaggaaatatggtacatatacaccatggaatactatgcagccataaaaaagaatgagttcatgtcctttgcagggacatggatgaagctggaaatcatcactctcagcaaactaacacaggagcagaaaaccaaacaccgcatgttctcattcatacggaggagctgaacaatgagagcatatgggcacagggaggggaacatcacacaccagggcctgttggggcgggggggtcaaggggagggatagcataaggagaaatacctaatgcagatgacgggttgatgggtgcagcaaaccaccatggcacatgtatacctatataacaaacctgcatgttctgcacacgtatcccagaacttaaagtataataaaaataaataaataaaataaagttgatcagagagcagagagtgaacatggaatttacttcattcctgcactgtcgtgactcatttgtgccatgttttgtgagcacacctgaggggcaggggtcagaattggagggagtcacaggtgtgtggctatcatcttttccttcccagtcccctggaaaggtgcttggttccacattttccatttgggggaacttccctaaagtgatacactggtttttgtctattatttgccaaatgtttcttatgggaagtgaaataagttatcttatttagtctcctcttcatctgaggttagtctctcttcatcatcatcctttcatcctggctactgagaaaaaaaagtagattcttttggtgctttttcaacatacactaagatcagtggagaactttctttccttacagggttggcctgtagtttgcaggggagagagaatggattaaattctgatacagaatagtgtgggttggcctatttgctctcctatctgagcactattagttattaacactgatattttatctccacttgtctgacttcaatgtccacctctcaggtggttccatcttaggccatagcaacattaagattgctttctgaccttctaacaccaacaaatcataattcccatatctccatgactcaacaaagcaaagcacaagtcccctgtgtcctggcaagagagcagatttgtgctgtttctgcctactggccacaaggaggcactgtggctttgttgtcatcagagtcaaatggggaggggcgaagatggctctctggaagattcttaagggaaaccctgggtttggccctagattcagggagctgggctgtctggaatgaaggctgggaatgaaggaattagagaccaaccaatttgcctgtattgttgtggagaagggttttgctctaaactgagctctgaatggggctgagtggcaggtgtgcttgcagtggatatatgtctgagcgcccttaagatgtggaggcacaagtagctggggtggtgcagtgcccaggttctgggctgggaaagcagagaagcagttttcatgttacaggagccttggagagcctggccccaaacccccaaaccagctcaggccagccctacctgctctgttaaaagtagaaggaagagcagggagagacggaggtgctaccctggaccatcggagggaccctgttccccagtgagggggcaatcacaattacaacaccagtagcatatacacttattaggcagacactagggtggagtagaacagagttttctccaccaagaccttttgctctcagcaggaaaatggcccagtctattaatagttcacctctgctactcacttcagactcctgtgtgtcccctggaagaaggtggggtctgggtagagatagtatcttttcttttggtttgaattaaagttctttccatatgactcgttcatttgcctctacctgtatcttgtatctagcttctgcctcttgtattcatgtgtgccttggacactataaagtatttgatttctactgctgctgtaatgaattaccactgattttggaggtttaaacaaaatacatttgctaccctacaatactggaggccaggagtccaaaatcagtgtaactgggccaaaatcaaggtgttggcaggcctgcgttctttcccagagctctaggggagaactgtttttctccccttttcagcttctagaggctaccagcgtgtcttggcttgttaccccattcaatcttcgaaaccaacagggactgactgagcctttgctcatgctgcatcactctgacactctttgtcctccctcttccacattttaggacccttgtgactacattggacccgcctggaaaatccaggacactctcccagtatgaaggtcagctgattgacaacctgactttgtgtggaactttaatttttcttttacaagtaacttaacacattcctaggttccagagattagacctggacgtggttggagggcctttgttctgcctaccaaacctaggaacttggtaagagggaggaaaacaaaatgatcacctggaaaccagaatactgaccaccgttttacatcccaggcctaacagacacaaaaagggatggagcccacaaggaaatagacacctcaggtctcacaagctcgtctgtaaactatttgctccttaggatcggaaagtactctggggtgcaggggactcagcagtatgcctctgtgccagcagcaaaaatgtggccctaaactgctccttcttggttagcaattaacccagttgaccaacccacagagcagaggcttctctcagctctgtacactctacaccctgagaggaagtcggcttctgagatgcaagactcttttataaggaaaagtccagttgtaaagattaagaaactttgagctttgctagaggtaaaaataggatgtaagtcaactctggagcatttaatttccaaatgtttatgaaaaagacaatcttcttcctgttttattgtatggatagagaatgagagagattctgtactctgggctttgcaaactcactagagttcaagaataaatacactcagagaggtctttcactgcaaagaagagctttgaaatcgaatgaactttcaggatatcagttcggctcctgtatctctaacaacgcagttgacatgcttgcccttcctagggatctcaggggccaactcctaactcacttgtggataattgaagtgcattcaaaggagtaggagcacagagacatcagggagaggaataggagagtttgcagagaatctggcttgctgtaagacaatgagttcatcttgaaataattggagtgtgaggtgcagatgaatatagttggcaagatcctaggtaagatatactatagagaaggctttatgaattggtaatatcaagacaaatccacagagagcctccgtaggtgtgcatttgtgtctcagatcaattatagttcagtcctgcctgattcatctcccagagatgcagcctccacttaaataaggagctttcaaattggaggtggtggcccattcagtgacgtcactgacagatgcatcttgtgtggataaaatgtcacaaaattaatttctttgttcatgctcacagaggccctggtctggaatgttccacttctgctctcactctgccatgggctcttggaccctctgtgtgtccctttatatcctggtagcgagtgagttctccgatatttattatggtcatgctggacctctgtctagatgactccttatattttccttattctttcccccaattctgtcttcttttatagcacacacagatgctggtgttatccagtcacccaggcacaaagtgacagagatgggacaatcagtaactctgagatgcgaaccaatttcaggccacaatgatcttctctggtacagacagacctttgtgcagggactggaattgctgaattacttctgcagctggaccctcgtagatgactcaggagtgtccaaggattgattctcagcacagatgcctgatgtatcattctccactctgaggatccagcccatggaacccagggacttgggcctatatttctgtgccagcagctttgccacagcactgcagaatctccccatctctgtgcagaaaccctggtgcttcctcttctccccacagctctcagcagtcgtcagcaaagtctttcctgctctctgctcaccatggctcacgcctataatcccagcactttgggaggccgaggtgggtggatcatgaagtcaggagatcgagaccatcctggctaacacagtgaaaccccgtctccactaaaaatacaaaaaattagccgggcacggtggcaagcgcctgtagtcccagctactcgagaggctgaggcaggagaatggcgtgaacccgggaggcggagcttgcagtaagccgagatcgtgccactgcacttcagcctgggcaacagagcaagactccatctcaaaaataaaataaaataaaaattaagtgggtttggagaatgacaaagacagaagatggtaggatattaacataaaaaaaatcatgtgtaggggataatgtagaaaatgtgttttgtgaatttctcacaaattgtctaaggagtcagaattcacaggcatgtaagataaaccttaattacccccactgtaggtttccttgtctccaggtatttgccatccgcattagcaagctgagagctcctgagaatggctatgtcttttgaactagtctgccctctgcattctattttcaccctaagctgtgaacagaaatttcccccacaagttttcttgattgtaaaagaaagttcttttctatggcattccttataatgttaatttcaacttaccatttatatagggattttgcattgcacttaaagagtaaacctcctgtgggtaatacaggcagtgaaataggttagatgtaagctgctcctcctggactctagggatctatttgtctttatcctgcttaaggagagccaagttctagctgaaggcctgtgccaactcacaggacactgacgtggtctcttccactgcctgcttggagctatccacatgtatccacacaggctgtctaaaagcacacaggcctggccagtcttactttgacctctttcctccctgatgctgtgtcctggacacgcatatctatatattttttctggtttatgccgcgtatttctacacagcacttgcaattcattctgaagaattataatttctttcttctatagtagtacttacatactgatcacttctcaacccctatcagggtatcattggcaggtgttgcaaactattcctgtattttgagtgcccaagacaatttgagtttacctgagttcttccatataggcctaggtttcacttgtcattgtctagttttgttatttaaaggccaaggttttcaagatcacaacagtacagaataaaattcaggaattttttaaaatgtacatcaaccgacctactctgtgtttatctattgtcctggtgtctcccttgctctttgggcttctctttgctgcctccagatcactttctttcctccttttttgaagcccagctccttacatacatgacgttagaacaggacccttcattgctgcacttgcttttttcccttcagaactctcttcccattcagtcctgtctgctactaatcctgtcatcattcttaacgactactcatcccacagaccatttttacattggtttggctcctcacttttgaggattttttttaacctactttttttttaagaattgcttccatgattacagtaaatatctactgaataaatgcatgtcttcctcagcttggagatttctgagggttgcaactttgtcgaatattttatccattaatcctaactgtgtatattagacaaggaaggtattaaaaatcatgttttaaatcagaaaatcaataaatagatttaaagagacaaatgcaaaacaaaactgtttagagctgctgttctgggctgaactacagatggactgtgtaagaaatagtaaaatcatctggtaatttcaacttatctttagaatctttggccggaacagctccagggaatcaagggatcataggtggaaagaaagacaaagaggttaaggaagtgagaactggctagggtagcattctctaccttaaggttttcaaacataatatcaaggtcctcagtttatttgtaatttttttgaggatgaaaggaaattatgcacgtgacccaaggtatacacaataaggaaactgacacatgactttgctgagatggaattatattaaagttctgtgacactcacaaactcatctcatgctgattagaaactgtgattggcaatgctgtgtgttacaaaaaaattaaaaaatgattcctttaaaaacattatttctttaaatcagcattttccaaaaatgggggaaatattaaatactatccaattttggtggtgcaaaaaataaaaaagcttaggggcttccagtacccctgacccagctgaccttcctttcccaggcccatgtcttttaatgtgcatttactcagggaaagggaagtgtggctgtgcaggaaaagtggcaatttagaaaacacaggctcaagggcttgatggagggtcccagaagagggcagggcactggtgatcagaggggattagagggcaagctgctagggtaagctgtgcatcagaagtggttccttttgtttccttcagcagtaaatttttattatcattattactttagctgtcctccatatctacttctttagtatggctggctacttctctttccaactctttatgcactaccgtggatctcaccctaggcagaaacaaatccccaaactctcaccagctgcgctcatgaaacaacccttcctggcaggctgtgatctcgccaagagcgatcaagttgatcaagctataaactgacttcatcactagtctaaagaggaaactgtggcaagaacagctgcaggagaaaccctaattacaatgggaggagagacataaggattttaaagcagttttcaaactagtccttctcaagaaccaaacatataagggatcactgggagctgtctctgaagtgggttaaagagaaaagaacagacaaagataaggttctgatgcctgctctctgttcctacagatctctccagaagtcactgtagacctgctacaatttccctcactttgctgtgacacagcctttcttcgttggttcctcctccctatgacttaaacctctctccctcccctcccctatctccattcttccagaaaattcctctgccattcccagagacttgcagaacactggggtttgaaatacattaaatagattttttttaattaataatgatctctgttaagtaacaaaagtttcatatgtgaattgtgcacaaaaaaattatagtaaacttctgagataatgttagaaggcttatgtaatgatcaggctagctttgatgaaggaatttgggactcagggtgagaagacaagataagttagtagacaataaaatgagttgatttattctgtagtagttgggaacttgtttaaaaaaatggagaaagaaattgttgaaaaccctaactccctcaagaggtctgggaatcctgtagcttacatggaatagaaactgaaagggaatcgcttgaacccaggaggcggaggttgcggtgagcagagaacatgccattccactccagcttgggtgacaagagcgaaactacatctcaaaaaaaaagcatgatcaaatttgaatcatagccaaatcttacaaaaattttatgtgaaatatttaattttgccaaaaaaaaaattgatgcaatgacctctacccttgttcacctttttttatcttcactatgtcacagagagtttggcacataatagatgataagtaaatttattttgactctattgagtaaatgacaataatatttcacattctctcaatataatagttgaattctatgtgtactttcttacttagcagagtttcacttcaaaaggggcttcgtcctccacatgaaatacaacagagagtcattatggctagtctcaattttccatacaacttctgcaatattccaagcaaatgtgtttccccagtcaggattaatgaccaatgttacacagtatcctaaccacatctaaagctggaatttgcaaacatccttttggaacaaagaaatttatgttataatagtatttatccagtctcatgatctggtaaaataaattcttcaccacaaccacattttcccaaaaccacattttttgaggctggaaacatcatcatctcagaaagcaccctaaaacactgtaagaaaaattcaccgtgctcggtaatagaatcttatcatccttgcaataagaagataccgtgtgtatgagtgcgagtgtgagagtgtgcatgtgtttatatgtgtgagtgtgtacacgtgtgtgtgtgcattttctcatggagactcatccacatgaaaatagtttctctttggatttcattactaagaggcactgggtgattggtggagctcataggcagttctggggagtgacaggaaatgtcagaccactcaatctgcctaagttatagctgatagggttgtttatttcaagactttctataaattaagaattaaatatgaaaaagcccagagacctccattataaaatgcactatctaaaattctgtaaataatccaagtacaaaatatgaagagatatgtgtctgatcaatcaaaaggagacatggaatatcgcgtttccaggctggatctgtttgatctcttcaagctgttttactttatgccctgtgttattcagggttctctctttcatcttatcatatgaattgcaattatgtaacatttatcagcaatcaaaatattggttaatgcacccttttgtctccactggctaagggtggatttgaagatcaaccctaaattggcctgcttgggaaagcattgaggttgtgtgtgtgagagggtagggtttgtaggagcggagatgcgggaatccctgttcctgatttggacaatcttgagcacatcagttcagaaagtgtgaatccatgagactctggacagttggccacgtggaggcactgtggcttcacaatgcagtggggaaccttggagagcggtgggagggtgacccaggagaggagggctgaagggaagcctggttgtctgctggcatcagcagggcaatctgagttcagagtggatcctgagttaaatactgccagagaagggtaggggtgccaaaggcctcaatttgccccaaggaaaaagtgtctctgtgtctgtatggacagtggagggtgctgaggctggggtgtcaagggctggggaatgcttctcaggacagggacagggtgggcaggcataggaaaataggggttgttgtgagcatgtgggcactgtgctgcacctgccccacctttcgtttaggggccctgcagaccaggaatggaacatggaatagcagagcctgaggcctgcctaagtatgcagtgagctcacagtgtcctgcagggccagtaactggaaaggccagtttcctatggaaatgccagaaatattcctgccctgactgaggttcaggatctggtggcagcctttcccaggcactctctgctgcttctttttttttttttttgagggcatcttgctttgctctgtcaccaaggctggagtacagtggcttgatctcagctcactgcagcctctgcctcctgggttcaaatgattctcctgtctcggcctcctaagtagctgggattacaggcacccaccacaacgcctggctaattttttgtatttttaataaagatggggtttcgccatgttggccaggctggtctcaaactcttgacttcaaacaatctgcctgcctcggcctcccaaagtgctgggattacaagtgtgagccactgtgcccggcccctctgctgcttctttatgtgacctgttttaattctgacagaaatcattcaaaataagtattatcttacctgtttatacatttgactgaagcagctttcctgggtctcacatacgcttagatggaagaaaccagacctggcattggatagatcagtagtagtgtgacagtagttaacatcagccaattatgcatttcaaaatagtgagaagagaataattcaaatgttcctagtctaaagaaaagataaatatttaagataatgcctatcccaatgaccatgatttgattatacaaatgtatcaatgatcatatctacctaaaaaatatgtacatctaatatacatcaataaatagtgaattaaaaaaaagataactggccgaagcctgttcctccaacacctctatccactgttcccactctgtagatttgtcctctcacctggccttccgtttccaggtccccattagcaggaggggaagattatgccacatatgtgatcattatagcctctccactgacaagtccaaggaggatatgacttccaggcaaaacatcttttcatctttcattgtgacaaaaatcaaggttcagttttctccactatagcagttctatgggtgaggccatgtgattgcttttatggaggctgtgtgaggagggaggtttctcagctgcacagcaaggaaataagatgttgtttaaggaaagcacagtcttccagtacctgatgcaatttaccatgagggaaaagacacaaataattgctattcattagttaattttattattttttaataagacacaaagtcatctaaaatgcaaagatagtagtctgataattaggtaaaactaacataaatggttgtgtcttaagggaaagtaaaaatgttgccccttacagcacttcctggttgatactgagtctgatatgcaagaaggtgtgatgctcccagaaagctgtgaattcagagcaatcagcaatcccacaaaagagctgatagaagaatgggcggttttattagaaagaagaggagcctctagtgccttccacgacatcctcactgcccacctctgatttcaggcttgctgtagtggacagttgtgtgcaagtccccattcgcctcgatctggcagtgcccttccacaggtgcatgctgggagtctctctgcttcttccccagggctgttccatgatattatctgagcccacctggcctgtactcaaagacagccagagctcctgatgcccctgctgagacagaggactaatgctccagcctgcccattcatgcagaaacttcagacagcattctgtgtgctcctgagaggccctgatggattccatctcctattgctccaacacaaactcttttgttgtttgtgcacttttatcctggcttcttccttccctattttatgtttcgttcctacttcttcttcctggaatcatttcccgaataagctacatgcacctaagtccccatcacagactttctcttcagggatagcctatactgtggcagtgatgggatgaagccaccatccaaagacccttccctttgaaggagacctttgtttttcttttactcataccgctacccattcgtttaaaaagtcttatgatgacatatataaactaatctcttccagattcatttggaattattcctgaattctcagcagcctcaggatggctctctgttcccttaaagctctgaacccaatttgaactgaatagacttgggttctctttacagaagcagagtttgcctggacccaggtaatcattcattccatttttcttccattcaacaaatctttaatgagctataggtgcagagtagattcaaattttgtggggcacaaagctgatacaattttaaggagctccttgcaaagaagaatgcaaaatgacaaagtgttggaaaggtcctgtgtgagtgagaaggcccgaggttattcttcattgatttcatggcaactacataggtactgtccaggtacttgggaaacaccagtggagaaaccagacagagcttcaagttgaggtagacacttccaaaaaattgttataacttattatactgaataataattaaaaagtaaaaggatatattccccatagatgcttatgtctccagagaagttagagtgctgttgaaagtactgacattctgggtagctcacacctcatttagggaaggatccttagagctctgggattctacgtgccgtatcccaaaaatgaaagtcctgcactgaaaagatttttttttcccctgccctggcccaaccacgaagattggcccctttgcttggtctcccaggaccagatgagttctgggcatagatgggaaagtccttccttggcttaccaggccccagccacggcctcccatggggatgctcatgggcctcctccctgtctccacttctgattctgtgtcctctctcactggagcatgattgtgggaattacccatccaggttgcatcaagatatgcaatagataatctattgtatctgaaataacaatagcagtgctattgactggatgtaagtttggtgccaaagcacgtttacacctcctccaatcttctcccatttagtgaatacaagatcttctgaatggaaatagaacatttccctgtgaccctagagactccagatagttgtagttctgggtgaacatttcatccacattcttaatgagcctcctcttttcttcataggaagtacagtcacttatgggacttaggtggtgagtgtttgtggcttcacctgaagcaaagggaaaaatcatcctcatgagaacacaccgcagcctgagcttggatggtgaggctcccatcaggtgcaatgaggtgctacagtgtgaaacaagacttcaaatgttaaagaccttgaatccacaactttgaaacctttctggatgtcagttgactcttttaaccaagggtatctctgtaggctgaaatacaaatatccagaggttaaacaaagtggaaaataattcaacttggagttgaattttgtacagagaagtcataaaagtcaccaggactgctatgacaatgctctttagactacagaaatattcataaatgttaaaacagcattcaaatgaagaatttagcataatgggagtaaaatacgcatagaagaacaaattcccctattaaaatcagggaatgagattacacattttaagatttctttcaaaacagatctacaaatttttcccaatctaagcttctcaagtatgtctataataaatgatttgttcctgtggggaagagaacagatgtggcaggttagctctgaggttcaagcatttagcagggacagtgacatcatcaagtcactgagagctcaacttcaatttgcccacagcagggctgggagacacaagatcctgccctggagctgaaatgggcaccaggctcttcttctatgtggccctttgtctgctgtgggcaggtgagggctggtcacaggagggcctccttccctggaattcccaaggactcaatgcaagcttttctgttgggatgacagcatcagtgtctgttgttctctattacaggacacagggatgctggaatcacccagagcccaagatacaagatcacagagacaggaaggcaggtgaccttgatgtgtcaccagacttggagccacagctatatgttctggtatcgacaagacctgggacatgggctgaggctgatctattactcagcagctgctgatattacagataaaggagaagtccccgatggctatgttgtctccagatccaagacagagaatttccccctcactctggagtcagctacccgctcccagacatctgtgtatttctgcgccagcagtgagtccacagtgctgcacagctgcctcctctctgcacggaaacggcagttagaaaaactgaggttgcctgtgcacccaagtctgggccccaccctgggacgtctcagcccccataggagtcacagagtcctgcccaggttgggggggtgtcttagagcaggggccatatgaccctcagtgctgtggctctattcctacccctgtctcagaccatctggagtttgccccaacacactaaccttgctgggtctttcttctgcagctctctttttctgcttgcagaatggaagagatattttgttgatattcctaattcccttcataatttcaaagccaacatattcttctctcccttatgggatcagtgacttcttcgtgtaaaccttaccgtatcctctactacccttcaactcacagacacaaatcttcccccatgtggtctctgctcctggctgcctttcttctaagggcaatagccctacaaggtcatctatcatttgcccttcacctgcttctccatcatcattttgtttttttttttttttttttttgagacggagtcttgctctgttgcccaggctggagtgcagtggcgcgatctcggctcactgcaagcccgcctcccgggttcgcgccattctcctgcctcagcctcccaagtagctgggactacaggtgcctgccacggcgcccggctaattttttgtatttttagtagagatggggtttcacggtgttagccaggatggtctcgatctcctgacctcgttattcacccgccttggcctcccaaagtgctgggattacaggcgtgagccactgcgcccagcctccatcatcattttgcattaagtttcccctggctttctgctttagccacactcccctacattcagtttacacgttcgcaggtgtagtgttgttttccaccctggggattgtttatgaataatagattatttctacttcactgagcatatgtgcctccaacttattcccaggcctccacttcattccttacataaaagtctatttcaggtacatttactcttaactgtaaaaagcaagacaaattttatgagagaaaaattaagaaatatatttttagcactcatttgaggaattagttttttagatgacacataagaaaaccactagccataaaaatatttgaggccgggcgcggtggctcatgcctgtaatcccagcactttgggaggctgaggcaggcggatcacttgaggttgggagttcaagatcagcctgaccaacatggagaaaccccgtctttactaaaaatagaaaattagctgggcatggggtgcatgcctgtaatcccacctactcaggaggctgaggcaggagaatcgcttgaacctgggaggcggaggttgctgtgagccgagatcatgccgctgcactccagcctgggcaacaagagcagaactccacctcaaaaaaaaaaaaaatttgtaactccagttgcattaaactaaacttttgtacaccaaaacatagcataagaaatgaaatgttaagccacagcacaggaaaaaaatgaggaatgcatgcagatgatgaaaaatcagtgtgacagagaagagtcaggctcacccatggctcctctatgcttcctggcctcatttgcacttggagggctgggagcatgtcaccaggttctgaatagtgggaggtgagtaaaaataatgttagcccaatttcaagtctggcccttaaaaatatcctgtaggtccatgctgagggtccctaagcgtactcccgtgtttagagatgtggtatatggcatagagttgtactcacagctaagattttctaacatgtcttagtaagttgtcagcagcagatcatatggagaaaacacaggtggaatctgaaggaatccaaactcaggcctccttatgctgtcttcctcccggggaggtcacacagggttctcgcttcactccgtagcaaaaatgcattaacacatgtgcagtgtttctaccaagtgagtccaacagagactcagcactcatgaggtttcagaggaggctggtcacaagcacatactgcctagcattaaccaaaaattcagactccagaaggaaatctggtgttcagtacaatactgtttgcaacaccagtttaggcacaacgagccgctcctctcagttaggagaaactttgccagtgcagggcatcactcatcagccaagtggccaaagatcagccaaagttcaatcttgcaagcaggcagtctcaagcctgctgtcaactcttttctgcacagacactcttcaactctcttttgccatgtgtggatgaatttgggaggtcatggcacagattataaactggaagcagcttggctccctgggtcataatttggtggacagccatggaaaaaaagctgctcatgccccactgggttttgtggtcatgagaggtaagacttgatagagttcagccactgagattttaggatttgttttatttatttttttttctgtagcataggtgtccttttctaataaacttagtacataaatgagtaaaacattcttattaataagacgacagcccaataaaaatggcaatactgaagctaaataggcaattcacacaagtgaacataagttaccactaaacatgagaataacttttcaaccttacttataatcagaatatagcaacctgaaataataagttatgattcaaaaattactagataggaaacttttcaaaggagtgacagtcctaaatctgaatagacatttgaactaatgaaaaccgtttatatatccactagaagagataatgacaaccacatcagaaaacccactgtgggatatattgtgactaatagcatttcttgagaaattatgagtgtatataaatcatttgggttccttttcttgtctttaggttcaatcgtagaaaattcaactttaagtatttatttttcctattgtaaaggtagttttttaaaacaatcttttaaaaaagtgggctgggcatggtggctcacacttgtaatcccagctactcaggaggctaaggcaggagaatcgcttgaacccagaggcacaggctgcaatgaaccaagattatgtcactgcactccagcctgggcgacagagtgagactccatttcaaaaaaaaagggtgggtggcagggggaaatatgtgtaacatataattttgtcactttatttttaaattgtacaattcagcagcattaagtacattcactatgttgggaaactgtcaccattatctgtttccaattttcttttcattgcctcaaacagaaactcaatacccactaaagaataactccacataccccctctttctgctaacctctaatctaatttctttctgaatgaatttgcctattgcagattatttatgtgaaaccatgcactatttttccttttgtgtcttgtatctttcacttagcttaatgctttcaaggtgcattcatattgtagcatttatcaaaacttcattccttttcatttctcaataatattttgttgtatgcatataccacatttgtttatccattcattaattgattaacatttgggttgtttctaccttgtagatattgggaataatggtgcaatgaatattggcctgaaaatatctgtttgatgccctgttttcaattcttttgggtatatacccaggagtgaaacttctgggtcctttggtaattctatgtttctccttttaagtaactaccaaaatggtttttttttggttgcagctgcacaattttagattcctaccagcaatgtcatttcttcacagaattgccagcatttatttcttgtttttcttttcaaaaatattatgatgatgatgattactattttgtatagccatcctagtcagtgtgaatgatatctcattgtggttgtgatttgcatttctctaatgactaaaaatgttaagtgccttttcttatgcctatgatcaatttgcacaccttctttggaggtaatgttttttgtctgattggcttttttggggtgtctcttgactttagaattatgttggtgtactgcgacaatgctaaaagaaattgagtttgaacttcatttgggaggtttgtggttggtagtgtttttagtgcggtacttcttaaacatttttaatataccatagaagagagaaaatgattacattttgatatgatttggctgtgtcccaacccaaatctcatcttgaattgtatctctcacaattcccacgtgttgtgggaggaaccctgtggggaggtgattgaattatgggggccgggtctttcctgctgtctcgtgatactaaatgagtctcttttagatctgatggttttaaaatgggattttccctgcacaagctctctcttttatgttaccatccaagtaagacatgacttgcccctccttgccttctgccatgattgtgaggcctccccagccatgtggaactgtaagtccattaagcctctttttcttctcagtctctggtatgtctttatcagcagcatgaaaatgaactaatacatatcgtgatttagggaactcctttttggattgaatttaactggcaacctctgagctttctgtacctggatattgctaactttttccagatttaaggaattttcaaccatgttttatatatgcttttgggactggaacaggatatggacatttttccaatgcatcactccacagattactactcagttacagagggtaaaagacatattaaaaatgaagagatccagtgtcagttacctcaaatatacattgacaaaactgcataaaaatgacattccacattcttgcaattgaccagatacaataggaaatacacatcatctgtggtgtatatttgccaagtaactaacctctaatagtatagaaattcttgttgtggctcattttacaactaagctgacctaggcacttcaaaaacttataatcatgaaaaacaggaaatataataagtgggtggaagagatgtataatttaaaagtaactaaggagaactgctaacctcatgaaatacgtgatctttgattttgttctagaggaaaagtgaatcaaaaccaagggacatgctgagacaactggagaaatttgaatgtgaagtatgtactagatgacaatgctatgtgaatgctaatgttttgagcgtaatagtgacatttgtggttatataagataatgccaattttttaggagactcattttattattaaggataaaatgcttcagaaattgagggcaaaatatatatagagagatcaagcaaaatcacaaaatgtacaatcggcacacagatatacattttaatattctgattgtttcattattctctcaccttttccatagatgttcagtttaaaaaaattgaagaaaaatattaacagaccaaaataaaatgttggtgttatttcagagtaataatgttgttgggtatttcttatattcatttttaatatatttgaaatactatgtcattaccataaaataaatatatcaaataaggtatcttttagtctagagtatacttttttaaataggagacaggctatgatttttaagaaagtcccaaaagaaaacaagagaatttgcagtctgaggacaaagcagcttggtatctctgagaccagtgcaaaacttagctagtaatgcatgtcaagaggccttttagcaaatatacaggactgttttctctgtatcaagagattctgagtattctacagtttggctgaaaactcaagaactttcaaaggtgactgaatgtaaagagaagagtagtgattttccaaagttagggctggacaatatgtatttgttcaacaaagagggaggctgtctcagtttatcctctgctgctatagcagaatacctgaggctgggaaaatgtataaagaaatttataaggaaaagggctttatttggcttgcaattctggaggctggaaagaccagtagggcatcaacatctactgaacttcttttgagggctttgtgctgtgtcacaacgtggaagagaagtgggagaaatgagcaggcctgtgcaaggagagccaggatgagcaagaccctcactttataacagcctgcttttatggtaactaatccagatgctggagagagagaactgactcctggcattaatctttgatgagggatctactcccatgacccaaacaattcccataaggctcacactaccccagaaaaatgtgagcaatgtgcctgtagcaacaccactacattgacgaataagcttcaacatgaattttggtgggaacacaccataactaaactataggacaggctctagcaagacagtaagaacaggtggaactaggaaaaaattttccctggtttctcacaaacactgtcctatattagccctgattctattgaagatagtatagaagtcccaccagtatctctaagccatggaccgaggacctaagtccagtgacactggccatcagaaggcactggggtttgatgatgctcaaatgtttttgaaacagggctcagtgctgcctgagatgttaagtttaaaggaaaagtgtgtatcctagtatccagtatcttgtttgcagaagttgtgagtagtcagtgaaatgtgaaatattaaaaaaaaaaaccctttatctttcattggtgctggcatgttctgctcagcagtaaaatctgaactgtagcaaatcttttgagtggagactcttctgggcttgcatgggaggtagatggaggaggaccaggagccagcctaaatgctcagagacccatgcaaagggaaaatgactggctcctcaggagaattcagagaaatgtgagcaatgcacctgtacctcacaccttacctattctagtcgtgctctggacaatgtatacgatgatgtaagggaaatataggagagtggacaattctagtttatgccagataggctattccaaattgcaggtagtaactacagatattcttaacaaaaaccggatttcccagggctctggccttttcttccctgagcagcacaatgaccagttcctgccttgacaagaattctgtcatagatttctcagttgcgctgcccaggaagcagatgaggcctgggaacaatgaggaatgtcttccctggacttgacatgcctcacttgcaagcacaccacatgcaggtcctgtggactgataggcttgatagacagataagtcctgtttccagctaccagcctccatcccctgaatgctgttgtcacccagaactgtaaacctggtcacaaagatggagcaggtagtggccccttaatgtgaagaaattttccatcatgcaattattacctggtgcctacatgagttggactcaaaccagcagatttttacctcagtagtaaaggatttatgacagaaacggatggctctggtaattctatacccacaggtattcacctgataaccttgacatgtgtcccctaggttttgcaggtttggtggaatatctctgagtgcacctcactgaacacatatatcctcattcccacctccctggacgtgcatctccttgtgttattgtcttatgccaactctgaggagcgccatcccctaactccttttatttcttattactcaggcaaggaataaaagtgcgtttgtgactaatgttgccccattagaaacaaaaaatagataatgaccactactgttcaactgtaatttacactagaggtatagctataaggttatttttagatttcagcaagtctctttgattttgcatttcttacaatatatactgatattttcagggataagagaattccccacctatcttcgataaaaatgagaacttactttcattgcactggtgacccaaaactacaggcagagccatgatgaaggcttggtacacaatgtatcatgaatgataacagtaaagaggaaactgttcattggccttcactaaaaatgaacccttccaactctgtgcccaggttattgttttatccctttagcttacagcgcgtcagctaattcaacaagcttctaggataaacttgtgtcaattaccccagcttctaagtgcataggaccaggaagatagagaacctagtaaaagagaaacacccaaagagaaggataattgctgataagacaaagaggtcactaactgatatctctgtttcgagttgccttcaactcgaaacatccagcagaggatgggcctagagatggagtaggagatccagtccccaagccctagagatgtgagtgaggacacttggctgaacttacacagtctgtgaatacagtaaagcaacttcgtgctctcttttagcttataataattggtttctaacaatgtaggcatttgtggaggcaatgatgtcactgtgggaactgccatgagaggacagggacgtccctcctcctctgcttttgctcacagtgaccctgattgggcaaagctcccatccttccctgaccctgccatgggcaccaggctcctctgctgggcggccctctgtctcctgggagcaggtgagtcctaggaacaccatgatcacattggatctctctgattatttcaatcatttccttctattttcaaattctgtctttttccttctcagaactcacagaagctggagttgcccagtctcccagatataagattatagagaaaaggcagagtgtggctttttggtgcaatcctatatctggccatgctaccctttactggtaccagcagatcctgggacagggcccaaagcttctgattcagtttcagaataacggtgtagtggatgattcacagttgcctaaggatcgattttctgcagagaggctcaaaggagtagactccactctcaagatccagcctgcaaagcttgaggactcggccgtgtatctctgtgccagcagcttagacacagtgtagcagagacacttccctcctgtgcagaaaaccagaaaaccgcaggactctctcctctctactcagctcacagcagcctttccttattcctcatcctcccaaggaagaagtgagttttcagatatagctaggactcatatagtgggaggaaataaactttttcttttcttttctttttttctttttgtttttgagatggagtcttgctccattgcccaggctggagtgcagtggtgcgatctgggctcactgcagtctctgcctcctgagttcaagtgattgtcctgcctcagcctccccagtagctgggatgacaggcatgtgccaccatgcccagctaatttctgtatttttagtagagacgggattttgatatgttggccaggctgatttcgaactcctgacctcaagtgattcgcccttctcggcatctcaaagcgctggaattacaagcttgagccactgtgcctggctggagataaactatttcttaaaacatgaaggctgcagttgttatttgaaaatatgtctaaggaatctgaaacacctatcggtgagaattcaagaaaccaaaactgaaagtgacttatcacagacttagtcttctggggtactaatagttgttcttgtatttaaaaaatgcatacaatattttatatcaattaaaaaatacgtaaatttgaaaaataaaaacatgcagtcaataaacatgtgtgataaactttaataatacagataatgattgtatgtgagtaacaatcagcaggttttctctctgcagttgtcagcatatgaataatttgaatcctatccttggtgacaccctggctctggagcctcctctagacctctcattggatgtattatgcaaccaaatctcaacaggtactatgtgtttggaaatctttttcccctgtttttgcagaaatatgctaataagagtaatgttaaagatgatgatgttgataatttcaactatttcattcggcaccctttaaatttcaaaaaaatgcacacaaatggatatcctggcaacgagtccaaaatcttagctcaaaatgaattctgctactccagagctttctaactcttccatgtaacaaacatatcccaacattatatggggctgggccagctagttcagagactgatgaggacactttcacttgtctgtcctcatatattaaaatagctccttagttgatatggtttgactgtgtccccacccaaatctcaacttgaattgtacctcccagaattcccacgtgttgtgggagggacccgggggatataattgaaccatgggggccagtctttcccatgctattctcatgatagtgaacaagtctcacgagatctcatgggcttatcaggggtttccacatttgcttcttcctcattttctcttgccgccaccatgtaagatgtgccttttgcttcctgccatgattctgaggcctccccagccatgtggaactgtaagtccaactaaacgtctttttcttccctgtcttgggtatgtctttatcagcagcatgaaaacagactaatacatcagtgcattagatattcctgaaagaacttcagaagcaattaactgcccctggtccagttgcctcctctgataatgcattgtgtgtgtccaactctagtctctaccctatcttctgcccagactgtcttgtactagaaattattctgaagtattggttagaatgtttggaaatgcagcttcctgggaatcttctgaaggactgtcactgtccctcagcccctcctgacttccctttccatccacctgactgcaggtcctaactgatggccatgaactcactacacatctcccttccttccctgcaatttactcagctaacaacacctcagccaggtggtgggtgaccatgaccatcctcctcttccttgccagaattttcatttggttctttttctgatctataaggtcatcttttacagtcagtcattccctcataaccttttttgagtgtatcttttatttcgttgagcataggacactcagttatttcagtctgtctgcttattttcacctctgtggtctttgtggacatttttgtatgtgtgctgcttctcagtcatttgtttgtatttttccttttaaacctgattatttttgacatcatgccagacactatggctgtagaaataatttctggtctaggatggatatatctttctccagagataattttattgtgctttgtaaagtgcatggatgcataaacaatccaggactccctggaacagaattaaaggcttgaggtgtcctggagaccctggaggacaggcttccttctagtgcattgattctattcaagtccctcaatggtcacattaagtaagttatggtctttgcctttacccctctggactgtgagtcagcttccttagtgctgggctgggatcagcaaatgcccataagggcagtgactgctgtgctcactcccgaggcccctgccttctccaagattctggcccagttattcctcatcgtatctttaggatatgaattagttgcagtttgttagtgtggttattttactcaagtacataaataataacaaaagcattaatctgagttccctcttctgtaattatacagattaaggtcaaaacattttatctgaagttttaattttctttgaattttaacgtcagattcttagtctgatttgtttgatatttgacttaaacagcgtagagatgttatacagaaactttaattttaaggaaagaactttttaaaaacttgaagtggatttataatcaaattgggacccttacttggttttgaggttttatcatttgagtatttttatgttatttattacataatctttgatgcttcactggatcataagacaagatgagaacagagagtgaatatttagacttgatcagagagcacaaagtgaacatggaattagtttctgttgatgaacagtccaactatgtaaaatatttaaagacatttattctgagccaaatatgagtgaccatggcctgtgaaacagccttctggaggtactgagatcagtgcccaaggtggtcagggtgcagcttggttttctacattttagggagacatgagacttgagacttcaatcaaacacaattaagagatacattgtttttggccagaaaggcagacacctggaggcaggagtggggagaggttccagcttaaaggtagatataaaatttttctggttgacaattggttgtctctcaggttaaattttaaaagagccctggctgggtaggaagtccattcagattattgggggccttttaattttatttgtggtttacacttcatttctgcattgttgtgatccatttgtgccatgttttttgagtacacctgagggccaggggtcagaactagagggagtcacagatgtgtgactatcatcttttcctacttaagcccaggcttctgggaaaacactttgctccacattttccatttgagggaacttgcctaaagcaatgctccagttttattctttctattgcttgccaaatcttccctatgggaagggaaataagttattttatttagtctcctcttcatctgaggttcctctctcttcattctctccctttcatcctggctactgggaataaaagcagattcttttggtgcttttttaaatgcactaagatcagtgggaaactttcttttccttatagggatggcctgtaatttggaggggagagagaatggattaaattctgattcaagacagtgttggtcggtctttttgccctcccatctgagccgggttgtttatggatattaaaactgatattatgtctccatctgtcagactgtaatgtccatctctcaggtggttccatcttaggtcataatgttgttttatgaccctccaacaccacaaattatggtatctcgtttccccatggctcaataaagggaagtgcaagtccttggtcttgacaaagagcacatttgtgctgttcctgcctactggccaccaggaggcactgtggcttcactgtcatccaaagtctatgggggaggggctgggattgctccctggaggatccttaatgaaaaccctggagttggacctagagtcagggagctgggttggaggtacctgcaatgaaggctgaaaataaagggattagagaccaacccttttgcctcttgatgcggagatgggttttgctgtaaattgagatttgaatagggctctgagtggcagatgggcttgcaagtggatgtaggtctgagctcactgaagacgtggaggcacaaggagctggggtggtgcggcgccgtgttctgggctggggaaagcagaaaagcagtgtttgtgtcacaggagccttgtagagcctggccccaagccggccgaggctagccctacctgttccgtcgaacgtagagggaagaacaggtagaaatggaggcgctaccctggaccatgtcagggggagcctgtcctcaggcagcttcaatcacaatgatgtaccagcagcatatacacttattagcaaggcttagggtggagtaggacagaattttctcccccaagaacctttgctcagggcgggaaaatgctgcagtctagttctaactctattactccagatgcctctgtgtccctggaagaaggtggggtctgggcatataaaagttttgtttgttttgcctgggttgatttcgtttttccatgtgatcgtgcatctgactctaccagtattttgtatccggcttctgcctctctctctcatgagtcccatggctactataaggtattcaatttctattgctgctgtaacgaattaccactaacttggtggcttacaaccacacaagtattaccttacagttctggaggtcagaagtccaaaatggatgttactgggctaaaatccaagcgttggcagggctgcattccttcctgaggctctagggaagaactgtttttctctccttttcagcttctagaggccaccagtgctccttggctcatggccccattcaatcttcaaagccagcaaggactggctgagactttgctcactctgcatactctgatgctcacttttcatcctccctcttccacattttaggaccattgtgattacattgggcccctatattaaggtcagctgattggcaagctcacttcacttggaacattaattcccctttatcaggtaatttaacacattccagggattaggcctgggcatggttgaaggggcattgttctgactaccaaacctaggcacctggtaatagggaggaaaacgtgttggtcaccttaaaaactgattgatgactaccgttttacattctggatctaacacacacaacaaagggatggaacccacaaggaaacagacacctcaggtcacacaagctcatctgtaaactatttgctccttaggatgggcaagtcccctggggcgcaggggactcagctgtatgcctctgtgccaacagcgaaaatgtggccttaaactgctccttcttctttgttagcaaataacctagttgaccaattcatagagcagaggttctctcagttctctatactctacaccccgagaggaagtcagttagtgagatgtaagattcttttataagaaaaagaccaggtgtaaagattaagaaatgctgagctttgctagaggtaagaataagatgtaaatcaactctggaacatttaatttccaaatctttgtgagaaagacaatcttgtttctgatttattgtgtggatagagaatgtgagagattctgtgctctgggctttgcaaactcaatagagttcaaggatcaataaactcggagagacccttcactgcaaagaagagctttgaaatctaatgagctttcgggacactgattcagctcctgtatctttaacaacgcggttgacatgcttgctcttcctgggtaactcagatgctaacttctaactcatttaaaggcatttgaagaactaggagcacagagtcaccagtgagaggaagaggagagtttgcagagaagctggcttgcaataaggcaatgagttcatctttaaatacttggagtttgaggtgcagatggatatagttggcaggctcctaggtaaggcatgttatggagaaggtgctatgaattgataatatcaaagcaaatctacagggatcctctgcaagtgtgcatctgtatctcagatcaattatagttgacttcagtcctgcctgattcatctcccaaaaatgtagtctgcctgattcatctcccaaaaatgtagcctccgcttaaaggagctttcaagttgggggtggtgggccattcagtgttgtcactaacagatgcatcttgtgggggtaaaatgtcccaaagtatcttttcttgcttatgttcataagggcgctggtctggaatgtgccacatctgttctcactctgccatggactcctggaccctctgtgtgtccctttgtatcctggtagcgagtgagtcctcatgtatttatcatcctcatgctgggcctctgtatagatgacttcctgtattttccttattctgtttcctaattttgcgttcttttatagcatgcacagatgctggcattatccagtcacccaagcatgaggtgacagaaatgggacaaacagtgactctgagatgtgagccaatttttggccacaatttccttttctggtacagagataccttcgtgcagggactggaattgctgagttacttccggagctgatctattatagataatgcaggtatgcccacagagcgattctcagctgagaggcctgatggatcattctctactctgaagatccagcctgcagagcagggggactcggccgtgtatgtctgtgcaagtcgcttagccacagcgctgcagaatctccccctccctgtgcagaaactctggtgcttcctcttttcctcacagctcccagcagtcctgagcaaagtctttcctgcctcaccctccccacaagaataattaagtgggtttggggcatggcaaagacataagatgatacaatatcaacatacaaaatcttgtgtaggagataatgtcgaaaatgcattttgcaaatttctcacaaattgtgtatggggtcataactcacacacaggtaggataaaccttaattacccacaccgtaggtttccctgccttcctgtatttgacactcccatccaaacagtgggagctcttcagaatggctatgtcttgtgaactactctgcccacttcattcccttctcactctaagccatgaacagaaatttcccctacaagtactctttattgtaaatgaaagttcttttctatgattgtggacattcctttataatgctaatttcaatttaccatttatatacggatttttacattaaacttaaagagatcttcagtgtggataatacaggcagtttaatacattagaagtaagctacccctcttggcctacagggatccatttgtttctatcttgcataaagcaagccaggtgctagctaaaggtctgtgtgcactcacaggacactgatgagatctcctccactgcctgttctggaactatcaatatgaatatacacagggtgtctaaaagcacacagggcctggtgtggtggctcatgcctgtaatctcagcactttgggaggctgaggcgggaggaatgcttgaggtggggagttcaagactaggctgggaaacagtgagattttgtctctaaaatatatatatattttaaaaattagcctggtatggcagtcttagctactcaggaggctgagttgagagggttgcttgagccctgaagttcgaggctggagtgagccatgatcatcgcaacagagtaagaccccaaatcacacacaaaaaataaataaataaagttaaaaaacatacacaggcctggccagtcttacttggccctctttcctccctgatgctgtgtcctgaacagccaaatctgtattttttttcttctggtttatgatacacatttctacacagcacttgcaatttattatgaagagttataatgtctttcttctatagtagtatttacatactgatgatttctcaacccctatcagtgtatcatcggcaattgttgcaaaatgtgcctgtattttgcatgcccaagacaatttgggtttacccgagttcttcgatagaggccctggtttcgcttgtcactgtcctatttttgttattcaaagactgagactttcaagatcagaatgatgcagaatgaaattcggggtatcctttaatgtacatcgagagacctactctgtgtttatatattgttttggtgtcttccttgctctttgggcttctctctgttgcctccagatcattttccttcctcctttgaagcccagctcctttacacacatgacattagaacagcacccttctttgctgcacttgcttctttcccttcagaactctcttctcattcagtccttctgtctgctactaatcttgtcatcattcctaatggctactcatcacacagaccatttttcattggttttgcttctcactttcttgacttcctcacttttgacattttatccattaatcctaacattgtatatctgacaaggaagatattaaaaatcacatgttttgaatcagtgaatcaataaacaggtttaaagagacaaatgcaaaacaaaattgtccagagctgctgttctgggctggactacagatagatcatgtaagaaataataaaatcatctggtaatttcaatttatctttagaatctttggacagaacagctccaggggagtcaagggatcatagatggtaagagagacaaagaggttaggaggtgagaactggctagggtggcagtccctaacctaaggttttcaaggataatatcaaggtcctcaatttcttttaaatattttttgaaagtgaaaggaaattatgcacatgacccaagctatacataataaggaaattgactcatgtctttgctgagatggaattatattaaagttctgtgaaattaacttatgggctcatctcatgctgattaaaaaccctgattgacagcgctgtgtgttacaaaaatgacaaaataaatgattactttaaaaacattattttaaaaaattagcatttgccaagagtgggggtaaaaaatgacatactgccagatggtacaaggaatggagacgtttgaggcttccagagcctctgacctagctcaccccactttcccgggcccgatgtcttctaaagttcatctgtgcagggaaagggaagtgtagttgtgcaggaaatacggcaggttaggaaatcacaggctctagagcttttacaggcttttacatcctgtgtatctgtgctatttccacagtctgcaacaaactgtattctccccaaacagggccagacactcctcatctatcaaggactgactcacatctaccttcctctttgcttcttaccctgacattccctggccactgcagtatatcattctgtttcctttacattcagaggaaaattcaggtatataattgatactactcgatgtttgtgaaatgaataaattaatgtccatttatacagagctctgaaatattatctattactgttttcccttcaaaaggggctccttttacttgaaatatgatggagagtcattatggctagtctcaattttccatacaatttctgcagtattccaagcaaatgtgttttcccagtcaggattaatgaccagtactacccagtaccctaactatatctaaagctggaattcacaaatgtccttttggaacaaagaaatttatgttataataatatttatccagtcctatgatccagtaaaagaaattcctcaccacaaccacacttttccaaaatcacatctttatgagtctggacacattatcaggggtgcatttcagaagtcaacctaaaacactgagagaaaaatttgttgtgctcagtaatagaatcttatccttgcaataagaagataccatgtgtgtatgtgtgtgtgtgtgagtgtatatgtgtgtatgagtgtgtgtgtgagagtgtatgtgtgagtgtgtatgagtgtgtgtgtatgtgcattttctcatgcagattcatccacatgaaaaagtttatctttggatcgcattacaaagaggcactgggtcacctggggagctcataggcacttctggctagtgatgggaaatgtcacaccactcaatctgcctaagttatagccaatagggttgtttatttcaagactttttataaattcagaattaaatatgtaaaaactagaagccccttttattaaatgcactatttaaaatttggtaataatgactctaaatacaaaatatgaagacacatgagatattaaatatttttccaagatcattctgctggatagcttcacactgtttaattgtatgtcctgtcttattcaggctcctctcttccaccttatcatatgaattgcaatgacataacaacgattaattttgcaatcaaaatgttggttaatacactcttttgtctccactggctaagggaggatttagagattaaccctaaattggcttatctgggaaagcttagagagggtgtatgtgagagggtgggggctgcaggagcgggatgcaggggtctctgttacggatttggacaatctagagctcatcagatcagaaggtgtgaatctgtgagactatggatctatagccacttggaggcgctgtgtctccgcaatgctgctgggaaccctggggaggggagggcaggtgacccagaagaggaaggctgaagagaatgcctggctgcctgctagcatcaggtgggggccatttgagttcagagtgagttctgagtttaacacagactcctcactgtccagagaagggtaggggtgcgaaaggcctcagtttgtaccaacaagagagtgtctctgtgtctgtctggccagtggatggtgaaggggctggggcatccagggcttgggaatcagtgtcagggcagggacagcggtgggtggagtaaggtgtgacatggacatgtggacactgtgctccacctttagtttcgggacccttcagggcaggaatgatacatggggtagcagagccaggcacccacctaagggtacagtgggcaaaggatggcctgcagaggaagtaaatagaaaggcaagtttcctatggtaatgccaaaacattcctgcccccactcagaaaaagaccatgaatgggatgttggcagccagaggggctcaggatctggtgatccgacaggcctttcccaggtaccctctgttgcttctttatgagacctgttttgattctaacagaaatcatgcaaaataagtattatttaactgtgtatacacttgactgaaataactttcctgggtcttgtacactcttagatggaagaaaccagacctggcgttggatagatcagtaatagggtgactgtagttaacatcaaccaattatgcatttcaaaatagctagaagagaataattcaaatgttcttaaggtaaagaaaagacaaatattaaagtgatgcctatcccaatgaccatgatttgattatattaatgtatcaaagatcacatctactaaaaaatatgtacatctaatatgtatcaataaatagttaattgaaaagaagataactagctgacgtctgttcctccagcacctctacctgctgtccccactctgcagatttgtcctctcacatggccttccctttccaggtccccattagcaggaggagaaagtcaggcattatatgtgatcactatactctctttgctgaaaagtccaaggaacatataacttccaggctaaacatattcattcatccttcattgtgacaaaaaagagaggtgcaattttctgcaccatagctgtcctatgaatgaggccaggtgatctctttcatgaaggatatgtgaggagagagatttctcagtgcacagcaaagggaatgggatgtttttaaaggaaagtgtagttttcctgtacctgatgtaatttattatgagggaaaagacacaaatcattattattcattagttaatttattgatttcataaacattttaagccccctgctttgtacaagggattgtgccacataaatttaaaagcgaaacaaaaaataaaatttagaaaaacagataagacaatttttaaaaacagtatgtttctcgcctttgacaatattaaggcaattaatatggaaatgtatttattgaattattttgaaatttatattttgctaattcaaaatactttaatgtttctgaattatacaaatgtcctttttaaaaatctttctctttagttacctacctccttttaccacctttttaaaaaaaattttagtgagaacatttaatatgagatctatcctcttaacaggcttttaagtatatagtagagtatcgtagtccacagacacaaggctgtacagtagatctctagaacttcctcatcctgcttaactgggaattttatacctgttgacagcaactccccattgccaccaatccctagcccttggaaaccaatgtttcagtttttacttccatgagtttgactatttaggttgcctcataaaagtagaaaaaggcacggtggctcacgcctgtaatcccagtactttgggaggccgaggtgggcacatcacgtgaggtcaggagttggagaccagcctggccaacatggtgaaaccctgcatctactaaaaatacaaaaattagctgggcacggtggcaggcgcctgtaatcccagctactcaggaggctgaggcaggaaaatcatttgaaaacgggaggtggaggttgcagcgagccgatattgtgccattgcactccagcctggtcaacaaggcgaaactccatctcaaaaaaaaaaaaaaaaaaaaaaaaagagtcgtgcagtatttgtctttctgtgtctggcttactcagttaccataatgtcctccaggtttatccacattgccacatatggtgagattttcttcttttttgatattatttccttgtgtgtatataacacatttaaggtctgtggtaataaatgcatagtatttgactgtttctataaaaccacacatcacacgagtaacagggtcatttgcagaggtgcaggctctgagtacattaatgcacctttatggttcaattatgctgcacggagaagattcagaaaaaaaaatcataattccatcctttattgtcattttactatacacaaaatagaagcccttcatttgcaaaattgcagttaattagaaattcaactgtcagaaaaagccttaagacacaaatgctattctcattttacagagaggagggaattgacccacaggttaaataacatgatcacattaaatggctattaggatgcagtaccgggggtccagctctgacctgtcagtctctaagccctgtgtttatagctctgtgctataaggcattttcatgaagagagacgcctacctttcaaaatcagagtatttgctctctacatccctttcagacctgctggctccaataacatcacagacagagatgaatgtatcctggagacagtatggggaaagaactctgaaaagatgccatggcacccagccctgactcccactctaacaccaccacatcactaactgagaccagctcttgacaggttaactttagtttggtttttgttttgttaatctataaaatgagactaatacagtctatctatagggctgtatatagaatttagtatcataaaatatctagcctataataggaatctaaatctcttgattccctttgttaatctcagacagcctcttccaccctcaccatgcacaaaggcagattcagacacactctgcctagaaatcttaagctgagaacttagaagtcacagaagtggaaatatatatacctgatgatccctcacatgaaattaactaaagaatgtagcatacatacctcctcagatagttaaaaatcaacttcattaatatatagattatataaacattacacattttaagtgaactgatgagtgattttggagcaatatatgtgtatagacccttcaatccccatccctattaagatgccgaacatttccatcacacagagagtgttctcattcctctctgcaatgcctccctccatccctgacaaccagtgatatttatcactagaaaattgttttgctcaggtacatttttaatggaaatttacaacctctaactattaaaacacttcctctttagtacacaggtaaatattcaagagagggaggtgctcccaaagatatttatggctattcccctcaatgacagaatggataaagaaaatgtgacacatatacaccatggaatactatgcagtcatatgaaagaatgagatcatgtcctttgcagggacatggatgaagctggaagccattatcctcagcaaactaatacaggaacagaaaaccaaacaccgcatgttttcacctagtgggagttgaacgaagagaacacatggacacagggaggggaacaacacacactggagcctgtcggagggcggagggtgagaggagggagagcattacgatgaatacctaatgcatgcggagcttaaagcctagatgacgggttgatgggtgcagcaaaccaccgtggcacatgtttacctatgtaacaaacctgcacattcttcacatgtatcccgaaacttaaagtaaaatttaaaaaatttaaaaaaagagagattttttatggctttagaagggtttcaaacccttccagaaccctgagagacacctgatccacgttagggataatcctgtctggagatagacaagatgatgaaatgacaccaaaaatcttcccacatggaagaggctatttccacataatttgttcattcattttcattattttttctcatacactcattcacttaaattattttataatgatattctgacaaaaactaatcatctccaagaacattattttgagtttccatcagacaatatttagctgtgattcagctctgcttcctgagcacatagagtgcactggggccaagtgaaccatgtgcaatagtgactaccttgagagataatgtcacattgagagaaggggtctctcttccttgaccgcaagtgtccaacccataaaacatgagccttgagctagaaaattcccctttctgttctggcgctgcctgggcaccaggctcttttgctgtgtgtccctctgttttctggaccagagaaatactgggcacatatgtggcatctactcattggtttgttggaccctagcttgcagataatagtaccaggtgttcctttgctgtgactttaacttctgtgttcttcacaggacacagtcccattgatgggatccaaagtaccattgatactgagtgacccagaccctggtcatgtacttgtgctaaaaaggaaaacagcacatggggaggtgagcagaatatgaaacacaattatggactcagaaacagccatacaacttattagcatcccgttgtttcaaaaaatcataagaatttgaagaacatgacaatgttatactgactgtggcgtcctaataagtgtgggactctgtgcaccaagatatgttatttgaattcctttttattgattactaaattaatggcaggaatcccacacaaagggatactccctatgaaacatgacaactcaaattaaaaaagagcactcttccttactctaaagtctgccctctctccccgagtccctcacgcataaggccacatttgtgcccctaggtcatgggcagcgctggttggccaccatcgtccacatgtagaaggcagtcagcaacgtgaagtggttctgcctactgcagtctcaccccagacatggaaagcaagagccctgggtggagctgaaggtgctcagctgggtttgtcagaagtctcatctgtcagtgagttgacaagaaacagagcaaaacgactcctccaatgttgacgagcctgcccctgggatttggaaacttcataacagaaaaaaccaatatagacaaaggattttaaacaggattaaggtcaattaagcaaattagaaaaggacacttgaaggagtatttgggacaggggaatcaaaagcaccaggaagacatgaggagtttccctaagactctagactacagcactagcactatgtagataactaacactaaaatattaattatatcattgaaaaaataaaatttacagtgaattacaaactgtttccaaaaggtcatgaaaatcttgtagacttgtttcaattcagacagatgtgttcttctcattctcagctgttcactggtgcatttattttggatttgaccatctggggaatgggtgtggcctctcctggcctctccctccctggggcccaggcagggagaatgtctcagaatgacttccttgagagtcctgctcccctttcatcaatgcacagatacagaagacccctccgtcatgcagcatctgccatgagcatcggcctcctgtgctgtgcagccttgtctctcctgtgggcaggtgggtcctgggcagagccccttgtgtgaatttcaaggcccagcgccttcccattggggctgcagcatcagctttgttctccttctctgcaggtccagtgaatgctggtgtcactcagaccccaaaattccaggtcctgaagacaggacagagcatgacactgcagtgtgcccaggatatgaaccatgaatacatgtcctggtatcgacaagacccaggcatggggctgaggctgattcattactcagttggtgctggtatcactgaccaaggagaagtccccaatggctacaatgtctccagatcaaccacagaggatttcccgctcaggctgctgtcggctgctccctcccagacatctgtgtacttctgtgccagcagttactccacagcgctacaaggccgtctcctctctgcacataaaggcagggaggttctgccctcctcccccacccaagactcagggatgccctgggcagagatctctgcgccaggaaccttggaacccacagtggccccaagtggcctggacagtatgagccttgctctgtgccaggtgcctctgcaggcatctcagccaggcctggactggtcccaggtcctcagatgtctcctttgttgctttctctggtctatccttggagctttccttttggggtggggccagggctttcccagctcctacttttctactcattatcctgagtccgaggcccccaggataaaacaggatttgcatttcagatccatctagactcccgtctctccctggtgaccctgttgcttcctctctctaatgtttcccccagcccccaccctcatgttttctctcctgtggcccacctttcccatctgggcagtcaccctccaaggcgttgctgggtctctcctccccccacctcctcgcccctctctactgcagccatgaggggagcccctgttctgtgcctccttccttcccatcacagagacttcaaaggccatttcctctgcccttgcatggagccttcctttctgcagtagccagctcctacctgtccttcatatctcagcatgatcaacccctcttgtgggaagcgctccctcccctcccatctgaaatcaactttcctctcataagctgtcacagattcatgtgtctgttagtaacctttagcacagcttggctttctcagatacttgtctggttatttttgtactccacccaatttttaagcccatgagagctaaggctgtgcctgctgcatttaccaacattggtgtctggcatgtagggagacccatttcacaaagaatggatgagtgaatgacaggctgagtgagtgatgagtgggtggataaaccaataataaaaacacactacatctactgtaacctggcagagatc

SEQ ID NO: 6898 - DNA, 1637 bp, Homo sapiens
  misc_feature (1)..(1637): n=a,t,g or c
ctacatactatgatcaagtatattgcatcctaacgctacctctgactcaacctgactttgtaggaaagcctacacgtagccttgtttgataaaaacacggaagtgactagagaatggaagataaaggaagaagctaggaagtccttgctatcaaaaccttatcctaatataggaccaattgaagtattcaaaaagaaaaacagtatcttatatgattagtttttgttggtggttttgttttcatttatttttgcaagagccactttttatttactttctctagggataagagataaaacttgaagtacttttttcaaatcttgtgtgcaaattagtattgttagcatctatttggcttattttagtatttttaagtctagtcacaaaccaaacaaaacttttgaaaatgagctatattttgttcaaagataattgatttgatcttatatttatttgtttttaggataatttttgatctttttgtaaactgctttgcttgttaatatctgtgaaaaataaatgagttcattttgttcactttccaattttcccgagtatcctagtcatcaaagataacagttcatcagaattacagtcagaaaatcctttttctactgaatagttagcagggaaaaataattctgatatttaactgtcataattctgtagtgctattatagtgaaaaactcagttctataagctagctgtgttgtcacagttttatcatagttcataattatttcatgtgcaatcctatttggaggccctgttagacttttaacaatcccatccatatctgtaattctctgatggcaagaatggatggagcatttctgagttaacagtgctggacagtatcgtactgggtgtcataaactctttatgaatggtaatattatgtaaattgaaatctggccctcaaactatattgcagctttcagcagtatgtttgaaggcctcttttgttaatgattctgtaatgtatgaattatgttcttgagtggttaaaaaagaatatgaaggcttgataattatttattgggtaaagtcaggaaattgtagtgaaagaactaatggttttgttttttggaataaaggcacctaagctattgctaattgaattgctgctagaattagaaattatgctttagaatagaattggtatttctgtgattctttttgcttcttggtattttctcttgtatctatgtatctagtattgaggcttgctctttcatgtggctttatcctctctttaatagctgttgtaaaattcctgagtaactggctgcttcaggatcagcttgcagagtcttgcttttaggttagatacaaacaaagtaaatcatagttggtgtaaatccagcaaaaaacagctggctttggaatggagaacactacaattcaaatttgaagtatattcagaagaaaactttggaattagctttacatttgtttgtaaatctaaacaaatatgcaaaattggtcaaaatgtaagtatatagcatttttaaagattaatggttccttttatgtgctgatttctttgtattctgttctctgcattcatcattcaggaataccaccaataaatgtatttatatatcccttaaaaaaaaaaaaaaaaaaaaaaaaa

SEQ ID NO: 6899 - DNA, 2424 bp, Homo sapiens
  misc_feature (1)..(2424): n=a,t,g or c
cctggaactctagcacgccgagtgaacttgaatctttggctatttaaggaggactgggtttgttgtgaagttgcggtgatccagcgcagagccccgtcctgattgatcgcatcgcggggctcagatgactgtaaaatgaatagatgaaattcttgcttctcgaagattttcttgggcatctcccggaaagtgcgttttaaggcgaagtcatgatgtattctcccatctgtctcactcaggatgaatttcacccattcatggaagcacttcttccacatgtccgtgcaattgcctatacttggttcaacctgcaggctcgaaaacgcaagtactttaaaaagcatgagaagcgaatgtcaaaggatgaagaaagagcagtcaaagatgagcttctcagtgaaaagcctgaaatcaaacagaagtgggcatccaggctccttgccaaactgcgcaaagatattcgccaggagtatcgagaggactttgtgctcaccgtgactggcaagaagcacccgtgctgtgtcttatccaatcccgaccagaagggtaagattaggagaatcgactgcctgcgacaggcagacaaagtctggcgtctggatctagtcatggtgatcctgttcaaaggcatccccttggaaagtaccgatggagagcggctcatgaaatccccacattgcacaaacccagcactttgtgtccagccacatcatatcacagtatcagttaaggagcttgatttgtttttggcatactacgtgcaggagcaagattctggacaatcaggaagtccaagccacaatgatcctgccaagaatcctccaggttaccttgaggatagttttgtaaaatctggagtcttcaatgtatcagaacttgtaagagtatccagaacgcccataacccagggaactggagtcaacttcccaattggagaaatcccaagccaaccatactatcatgacatgaactcgggggtcaatcttcagaggtctctgtcttctccaccaagcagcaaaagacccaaaactatatccatagaygaaaatatggaaccaagtcctacaggagacttttacccctctccaagttcaccagctgctggaagtcgaacatggcacgaaagagatcaagatatgtcttctccgactactatgaagaagcctgaaaagccattgttcagctctgcatctccacaggattcttccccaagactgagcactttcccccagcaccaccatcccggaatacctggagttgcacacagtgtcatctcaactcgaactccacctccaccttcaccgttgccatttccaacacaagctatccttcctccagccccatcgagctacttttctcatccaacaatcagatatcctccccacctgaatcctcaggatactctgaagaactatgtaccttcttatgacccatccagtccacaaaccagccagtcctggtacctgggctagcttggttcctttccaagtgtcaaataggacacccatcttaccggccaatgtccaaaattacggtttgaacataattggagaacctttccttcaagcagaaacaagcaactgagggaaaaagaaacacaacaatagtttaagaaattttttttttaaataaaaaaaaggaaaagaggaagactggacaaaacaacacaaaggcagaaaggaaagaaactgaagaaagaagataatagaccagcaattgcagcacttacaatcactaattcccttaaggttaaactgtaatgacataaaaagggtcgatgatatttcactgatggtagatcgcagcccctgcaacgtagcctttgttacatgaagtccgctgggaaatagatgttctgtctctatgacaatatattttaactgactttctagatgccttaatatttgcatgataagctagttttattggtttagtattcttgttgtttacgcatggaatcactattcctggttatctcaccaacgaaggctaggaggcggcgtcagagatgctgggtgacagagccatgagccagccattttataagcactctgatttctaaaagttaaaaaaaatatatgaaatctctgtagcctttagttatcagtacagatttattaaatttcggcccttaacccagccttttccagtgtgtaacccagtttgaaatcttaaaaaaagaaaaaatgaaaaaaaaaggaaaaaaagaaaaaaggaaaaaaacagtttgaacacaaaggctctatggaagaaatgcctctatgtaggtgaagtgttctctctgcatgcaacagtaaaaattaatataatattttccccacaaaagaaacacttaacagagggcaagtgcaatttattaaatttatattcttaaagggggaattcatggattattaaggtccttcaggcccttggggactctta

SEQ ID NO: 6900 - DNA, 934 bp, Homo sapiens; identical to SEQ ID NO: 4190
  misc_feature (1)..(934): n=a,t,g or c

SEQ ID NO: 6901 - DNA, 1516 bp, Homo sapiens
  misc_feature (1)..(1516): n=a,t,g or c
tgaaagaacaactcttgcacctctcagagaagataactgcctcttgtacttggatgcgtagtacatcatatgtatacaatcagataaaagcatagaagtaaatcattcggatgtgatttttatttggttttcatggaaagttaaagtgataaagtatattgaatagttctttgacagaatttgtttaaactatgaaactacacacttaaaaatctaagatgtggattattgttagaatctgcaacttcattggcaaattatttcaagtatttttctataatcactttccccttctaaataaataaacttcgagaataacccatcataatccaaacaaatgatgcctcaacattttgagctgctctgtcggacaaataaacctggtcctcttgaggttatattttggatatacatttttaaactgtcagtaattattgtcagatgtggagttcaatagccagccagtgttcatttttatccttgagcttttagtaaaaacttcctggttttatttttagtcattgggtcatacagcactaaagtctgctatttatggaaactaacttttttgtttttaatccaggccaacatgtatgtaaattaaatttttagataattgattatctctttgtactacttgagatttgattatgagatgtgcatattgctttgggaagagctcgaggaaggaaataattctctcctttgttttgaacctcaaactagataaaccctaggaattgcttaactgcaacaagtaattttcattcccacaaaaacctgaggcagctcttttgcccagagcgttccctgtagccacccccaccccacttgcccttggttctttagaaggagcacacacatcccttgattcctccctgatgtggtaaactggcacactccaggggtctaaaacataaaacagttgtgtttagggaaccttaagtcatgcagacatgactgttctctttgtacaagtgtgaatcaaaatatgtatctctttttcagagtctggttaagctatgtcattgtctactgcatagtttcctgagtctgtttgtaaagtgcttatggctaacagttcagttctgtatttgttgacaggtaaataagtggagttgagtgccatctttgaaaaaattaccctctagctctaacactgaaaataataataaattgtagatctctgcaactaagtttaaagcagtgtgactgtgttgcttaaatatcaagtattgtttataaccaccaaaaaaaaaaaaagccctggtagttttttggcaccttatgtttaaatcagattcttagatttggagtagacctgaccttgttatttattagataacattttgaatgtatccattggatttctaaaatgtattgtgaatttctcagacaaacaggatttatgctggagctctgttttgcttagaaataaaatatttagtagtttatttctgctctaattaaaatgtcaagaatgccaaaaaaaaaaaaaaaaaaaaaaaaaaaaaaa

SEQ ID NO: 6902 - DNA, 5421 bp, Homo sapiens; identical to SEQ ID NO: 5205
  misc_feature (1)..(5421): n=a,t,g or c

SEQ ID NO: 6903 - DNA, 3565 bp, Homo sapiens; identical to SEQ ID NO: 793
  misc_feature (1)..(3565): n=a,t,g or c

SEQ ID NO: 6904 - DNA, 882 bp, Homo sapiens; identical to SEQ ID NO: 6600
  misc_feature (1)..(882): n=a,t,g or c

SEQ ID NO: 6905 - DNA, 1558 bp, Homo sapiens; identical to SEQ ID NO: 6000
  misc_feature (1)..(1558): n=a,t,g or c

SEQ ID NO: 6906 - DNA, 2363 bp, Homo sapiens
  misc_feature (1)..(2363): n=a,t,g or c
tcgagcccgctttccagggaccctacctgagggcccacaggtgaggcagcctggcctagcaggccccacgccaccgcctctgcctccaggccgcccgctgctgcggggccaccatgctcctgcccaggcctggagactgacccgaccccggcactacctcgaggctccgcccccacctgctggaccccagggtaaggacaagggcccccagactcacagttccagccctgaggacaggggttccctcatccccccacccagcctaatgcccacctcctaatagaggggttcctggggacctgaagagggggcactatgacgtctccccaagcacctaggtgttctgtcctgctcttccttcagactcagccgttggaccccagtcctttcctccccagacccaggagttccagccctcaggcccctcctccctcatactagggagtcctggcccccaaattcctcctttcccaagacttatgatttcaggtcctcagctgtctcctccctcaaaccgggatcctcagtcccctgctccaccaggctcaggcatgggggtccccatccctgcaaatccaggcgtccccccgctgctggtcagacactgaccccatccttgaacccagcccaatctgcgtccgtgatcacggcgtgctctggccaaggcccagtccctacagcctgcctggatggacgcctgggactgggggcgccaggactgggctgggctgggctcccccaggccctgcctccccgtccatctcctcacaggtcccaccctggcccaggaggtcagccagggaatcattaacaagaggcagtgacatggcgcagaaggagggtggccggactgtgccatgctgctccagacccaaggtggcagctctcactgcggggaccctgctacttctgacagccatcggggcggcatcctgggccattgtggctgttctcctcaggagtgaccaggagccgctgtacccagtgcaggtcagctctgcggacgctcggctcatggtctttgacaagacggaagggacgtggcggctgctgtgctcctcgcgctccaacgccagggtagccggactcagctgcgaggagatgggcttcctcagggcactgacccactccgagctggacgtgcgaacggcgggcgccaatggcacgtcgggcttcttctgtgtggacgaggggaggctgccccacacccagaggctgctggaggtcatctccgtgtgtgattgccccagaggccgtttcttggccgccatctgccaagactgtggccgcaggaagctgcccgtggaccgcatcgtgggaggccgggacaccagcttgggccggtggccgtggcaagtcagccttcgctatgatggagcacacctctgtgggggatccctgctctccggggactgggtgctgacagccgcccactgcttcccggagcggaaccgggtcctgtcccgatggcgagtgtttgccggtgccgtggcccaggcctctccccacggtctgcagctgggggtgcaggctgtggtctaccacgggggctatcttccctttcgggaccccaacagcgaggagaacagcaacgatattgccctggtccacctctccagtcccctgcccctcacagaatacatccagcctgtgtgcctcccagctgccggccaggccctggtggatggcaagatctgtaccgtgacgggctggggcaacacgcagtactatggccaacaggccggggtactccaggaggctcgagtccccataatcagcaatgatgtctgcaatggcgctgacttctatggaaaccagatcaagcccaagatgttctgtgctggctaccccgagggtggcattgatgcctgccagggcgacagcggtggtccctttgtgtgtgaggacagcatctctcggacgccacgttggcggctgtgtggcattgtgagttggggcactggctgtgccctggcccagaagccaggcgtctacaccaaagtcagtgacttccgggagtggatcttccaggccataaagactcactccgaagccagcggcatggtgacccagctctgaccggtggcttctcgctgcgcagcctccagggcccgaggtgatcccggtggtgggatccacgctgggccgaggatgggacgtttttcttcttgggcccggtccacaggtccaaggacaccctccctccagggtcctctcttccacagtggcgggcccactcagccccgagaccacccaacctcaccctcctgacccccatgtaaatattgttctgctgtctgggactcctgtctaggtgcccctgatgatgggatgctctttaaataataaagatggttttgatt

SEQ ID NO: 6907 - DNA, 1642 bp, Homo sapiens; identical to SEQ ID NO: 6602
  misc_feature (1)..(1642): n=a,t,g or c

SEQ ID NO: 6908 - DNA, 2780 bp, Homo sapiens
  misc_feature (1)..(2780): n=a,t,g or c
gtgggcggaccgcgcggctggaggtgtgaggatccgaacccaggggtggggggtggaggcggctcctgcgatcgaaggggacttgagactcaccggccgcacgccatgagggccctgtgggtgctgggcctctgctgcgtcctgctgaccttcgggtcggtcagagctgacgatgaagttgatgtggatggtacagtagaagaggatctgggtaaaagtagagaaggatcaaggacggatgatgaagtagtacagagagaggaagaagctattcagttggatggattaaatgcatcacaaataagagaacttagagagaagtcggaaaagtttgccttccaagccgaagttaacagaatgatgaaacttatcatcaattcattgtataaaaataaagagattttcctgagagaactgatttcaaatgcttctgatgctttagataagataaggctaatatcactgactgatgaaaatgctctttctggaaatgaggaactaacagtcaaaattaagtgtgataaggagaagaacctgctgcatgtcacagacaccggtgtaggaatgaccagagaagagttggttaaaaaccttggtaccatagccaaatctgggacaagcgagtttttaaacaaaatgactgaagcacaggaagatggccagtcaacttctgaattgattggccagtttggtgtcggtttctattccgccttccttgtagcagataaggttattgtcacttcaaaacacaacaacgatacccagcacatctgggagtctgactccaatgaattttctgtaattgctgacccaagaggaaacactctaggacggggaacgacaattacccttgtcttaaaagaagaagcatctgattaccttgaattggatacaattaaaaatctcgtcaaaaaatattcacagttcataaactttcctatttatgtatggagcagcaagactgaaactgttgaggagcccatggaggaagaagaagcagccaaagaagagaaagaagaatctgatgatgaagctgcagtagaggaagaagaagaagaaaagaaaccaaagactaaaaaagttgaaaaaactgtctgggactgggaacttatgaatgatatcaaaccaatatggcagagaccatcaaaagaagtagaagaagatgaatacaaagctttctacaaatcattttcaaaggaaagtgatgaccccatggcttatattcactttactgctgaaggggaagttaccttcaaatcaattttatttgtacccacatctgctccacgtggtctgtttgacgaatatggatctaaaaagagcgattacattaagctctatgtgcgccgtgtattcatcacagacgacttccatgatatgatgcctaaatacctcaattttgtcaagggtgtggtggactcagatgatctccccttgaatgtttcccgcgagactcttcagcaacataaactgcttaaggtgattaggaagaagcttgttcgtaaaacgctggacatgatcaagaagattgctgatgataaatacaatgatactttttggaaagaatttggtaccaacatcaagcttggtgtgattgaagaccactcgaatcgaacacgtcttgctaaacttcttaggttccagtcttctcatcatccaactgacattactagcctagaccagtatgtggaaagaatgaaggaaaaacaagacaaaatctacttcatggctgggtccagcagaaaagaggctgaatcttctccatttgttgagcgacttctgaaaaagggctatgaagttatttacctcacagaacctgtggatgaatactgtattcaggcccttcccgaatttgatgggaagaggttccagaatgttgccaaggaaggagtgaagttcgatgaaagtgagaaaactaaggagagtcgtgaagcagttgagaaagaatttgagcctctgctgaattggatgaaagataaagcccttaaggacaagattgaaaaggctgtggtgtctcagcgcctgacagaatctccgtgtgctttggtggccagccagtacggatggtctggcaacatggagagaatcatgaaagcacaagcgtaccaaacgggcaaggacatctctacaaattactatgcgagtcagaagaaaacatttgaaattaatcccagacacccgctgatcagagacatgcttcgacgaattaaggaagatgaagatgataaaacagttttggatcttgctgtggttttgtttgaaacagcaacgcttcggtcagggtatcttttaccagacactaaagcatatggagatagaatagaaagaatgcttcgcctcagtttgaacattgaccctgatgcaaaggtggaagaagagcccgaagaagaacctgaagagacagcagaagacacaacagaagacacagagcaagacgaagatgaagaaatggatgtgggaacagatgaagaagaagaaacagcaaaggaatctacagctgaaaaagatgaattgtaaattatactctcaccatttggatcctgtgtggagagggaatgtgaaatttacatcatttctttttgggagagacttgttttggatgccccctaatccccttctcccctgcactgtaaaatgtgggattatgggtcacaggaaaaagtgggttttttagttgaattttttttaacattcctcatgaatgtaaatttgtactatttaactgactattcttgatgtaaaatcttgtcatgtgtataaaaataaaaaagatcccaaat

SEQ ID NO: 6909 - DNA, 3132 bp, Homo sapiens; identical to SEQ ID NO: 813
  misc_feature (1)..(3132): n=a,t,g or c

SEQ ID NO: 6910 - DNA, 3658 bp, Homo sapiens; identical to SEQ ID NO: 6603
  misc_feature (1)..(3658): n=a,t,g or c

SEQ ID NO: 6911 - DNA, 1195 bp, Homo sapiens; identical to SEQ ID NO: 6604
  misc_feature (1)..(1195): n=a,t,g or c

SEQ ID NO: 6912 - DNA, 1707 bp, Homo sapiens; identical to SEQ ID NO: 3115
  misc_feature (1)..(1707): n=a,t,g or c

SEQ ID NO: 6913 - DNA, 2304 bp, Homo sapiens; identical to SEQ ID NO: 302
  misc_feature (1)..(2304): n=a,t,g or c

SEQ ID NO: 6914 - DNA, 3151 bp, Homo sapiens; identical to SEQ ID NO: 5870
  misc_feature (1)..(3151): n=a,t,g or c

SEQ ID NO: 6915 - DNA, 415 bp, Homo sapiens; identical to SEQ ID NO: 819
  misc_feature (1)..(415): n=a,t,g or c

SEQ ID NO: 6916 - DNA, 1011 bp, Homo sapiens
  misc_feature (1)..(1011): n=a,t,g or c
gatttgcggaagaacctgaccgtggacgagggcaccatgaaggtagaggtgctgcctgccctgaccgacaactacatgtacctggtcattgatgatgagaccaaggaggctgccattgtggatccggtgcagccccagaaggtcgtggacgcggcgagaaagcacggggtgaaactgaccacagtgctcaccacccaccaccactgggaccatgctggcgggaatgagaaactggtcaagctggagtcgggactgaaggtgtacgggggtgacgaccgtatcggggccctgactcacaagatcactcacctgtccacactgcaggtggggtctctgaacgtcaagtgcctggcgaccccgtgccacacttcaggacacatttgttacttcgtgagcaagcccggaggctcggagccccctgccgtgttcacaggtgacaccttgtttgtggctggctgcgggaagttctatgaagggactgcggatgagatgtgtaaagctctgctggaggtcttgggccggctccccccggacacaagagtctactgtggccacgagtacaccatcaacaacctcaagtttgcacgccacgtggagcccggcaatgccgccatccgggagaagctggcctgggccaaggagaagtacagcatcggggagcccacagtgccatccaccctggcagaggagtttacctacaaccccttcatgagagtgagggagaagacggtgcagcagcacgcaggtgagacggacccggtgaccaccatgcgggccgtgcgcagggagaaggaccagttcaagatgccccgggactgaggccgccctgcaccttcagcggatttggggattaggctcttttaggtaactggctttcctgctggtccgtgcgggaaattcagtcttgatttaaccttaattttacagcccttggcttgtgttatcggacattctaatgcatatttataagagaagtttaacaagtatttattcccataaaaaaaaaaaaaa

SEQ ID NO: 6917 - DNA, 4211 bp, Homo sapiens; identical to SEQ ID NO: 6605
  misc_feature (1)..(4211): n=a,t,g or c

SEQ ID NO: 6918 - DNA, 1877 bp, Homo sapiens
  misc_feature (1)..(1877): n=a,t,g or c
cgcccccagagtctggctttccgcggctgcccgcctcgcgcgtcttccctgcccgggtctcctcgctgtcgccgccgctgccacaccatggccttcgtcaccaggcagttcatgcgttccgtgtcctcctcgtccaccgcctcggcctcggccaagaagataatcgtcaagcacgtgacggtcatcggcggcgggctgatgggcgccggcattgcccaggttgctgcagcaactggtcacacagtagtgttggtagaccagacagaggacatcctggcaaaatccaaaaagggaattgaggaaagccttaggaaagtggcaaagaagaagtttgcagaaaaccctaaggccggcgatgaatttgtggagaagaccctgagcaccatagcgaccagcacggatgcagcctccgttgtccacagcacagacttggtggtggaagccatcgtggagaatctgaaggtgaaaaacgagctcttcaaaaggctggacaagtttgctgctgaacatacaatctttgccagcaacacttcctccttgcatattacaagcatagctaatgccaccaccagacaagaccgattcgctggcctccatttcttcaacccagtgcctgtcatgaaacttgtggaggtcattaaaacaccaatgaccagccagaagacatttgaatctttggtagactttagcaaagccctaggaaagcatcctgtttcttgcaaggacactcctgggtttattgtgaaccgcctcctggttccatacctcatggaagcaatcaggctgtatgaacgaggtgacgcatccaaagaagacattgacactgctatgaaattaggagccggttaccccatgggcccatttgagcttctagattatgtcggactggatactacgaagttcatcgtggatgggtggcatgaaatggatgcagagaacccattacatcagcccagcccatccttaaataagctggtagcagagaacaagttcggcaagaagactggagaaggattttacaaatacaagtgatgtgcagcttctccggctctgagaagaacacctgagagcgctttccagccagtgccccgagtgcctgtgggaatgctctttggtcagacattccctcacacagtacagtttaataaatgtgcattttgattgtaatctatcgaagtgattattacaccagttacagcagtaatagattctccattaagaaataattcccttttttagtctgttcatttctgtgtattttctaaacagctttacacccttggtgccttggagcaaacatgttttttgaaccttgtcatttttgtgaagaattgcctagattccttctctcatcaacgggaaagtacttcctctgagagtgcgagtgcaccatgctcactgttgctgcgtgggagagtcacaagccactggcaagcaagtggtatagtctgtgaagcactgcagcgagcagcacctggatcttgcctttataagaacattttactacctgcagctttgagtcttgccctacattttgggcatgacataagatgtgtctttattcagctcgtcgtgaagatgctgctgctgaatgggtcagcatatctctgtttgcatggtttgcaggaggtcggttttcatggtcattcagttccacagatctgaatgattactgtctgtctgtgtcttttttccatgagaaatcactgttgcaaattgcctataaattgactctactaaaataacaatgtttcagtctgaaaatttgaattgaaaaaaatgtataatataaaattgtaatacactcaaatgattataaaagtaaaagttggtaatttaggcaaaaaaaaaaaaaaaaaaaaaaaaaaaaaaaaaaa

SEQ ID NO: 6919 - DNA, 2770 bp, Homo sapiens
  misc_feature (1)..(2770): n=a,t,g or c
ggcgccccgcctcccgcccgccatgcccgcgccccgcgccccgcgcgctctggcggccgccgcgcccgcgtccgggaaggccaagctgacgcacccggagaaggcgatcctggcaggcggcctggcgggtggcatcgagatctgcatcaccttccccaccgagtacgtgaagacgcagctgcagctggacgagcgctcgcacccgccgcggtaccggggcatcggtgaggagggggagggccgcggccgccgggcgggcgggtacccagggcgggccaccgagggccgtggggtcctgaccgccccctcccccaggggactgcgtgcggcagacggttcgcagccatggcgtcctgggcctgtaccgcggccttagctccctgctctacggttccatccccaaggcggccgtcagtgtaggccggcgtctgcgggagggggctcggccgcgggcagcccctctcacccgcctcccgcctccaggtttggaatgttcgagttcctcagcaaccacatgcgggatgcccagggacggctggacagcacgcgtgggctgctgtgcggcctgggcgctggcgtggccgaggccgtggtggtcgtgtgccccatggagaccatcaaggtggggaaggtcctggcgaggacccggacagcgagggagtacggagacgggcggccccgctggcccggtgctcccggggcaaccgcaagctggggagggtctcctggacgccagggaaggccggcggggtgacccgggggccctggggcaggacgcctgccacgaagggccacccgtggaggctgagtctatgctaaaggcagccttaaagtctttaaaaaatacttttataaagcagaaaacaaaatgacaccttcactgccaaaactggaaaagagcagcaaacataaagggagaggctgctcacagggctgccctgtgtccagagcatggtctcgtgtgggctgccctgtgtcccggggcatggtccgtgtgggcagcccagggcgcttggctgcacggcttcctggggaagagttcccagttccctccaccctggatgggccctgggctgccagctagccaggacccacccaggtgcagccgagaacctgcgcctttgcttctctctctcaggtgaagttcatccacgaccagacctccccaaaccccaagtacagaggattcttccacggggttagggagattgtgcgggaacaaggtgagccactcgaccttcctgatagggctcagggacctgggcagggtgggaagggcctgcacctcccatcctgccttgggctttgtgcaacacccaccccccacacacaccaattcccaaccggggcctgagaggctgcagggtaaccccgtgcctgccttcccgcagggctgaaggggacgtaccagggcctcacagccactgtcctgaagcagggctcgaaccaggccatccgcttcttcgtcatgacctccctgcgcaactggtaccgaggtgtgtctgcatcacagggccccatctctgcacatggccagctcctctcctctccttggggccacccctgggtggcgggcacccaccttttgaagtgctgatccaggcccctcccggcaccctctgacccacctcacccctcctatatccaggggacaaccccaacaagcccatgaaccctctgatcactggggtcttcggagctattgcaggcgcagcgagtgtctttggaaacactcctctggatgtgattaagacccggatgcaggtggtggggccgggaaggggaggggaaggggggaccaggccagagctagctgctgagcccctgcctgctgatgtccccataggcctggaggcgcacaaataccggaacacgtgggactgcggcttgcagatcctgaagaaggaggggctcaaggcgtgagtggggaggggcagggctattgtccccacctcaaacctttcgccctacctggcctgcccactctgtccccttcagcctctgtgcctctcacttcagtatctggggattgccctgtgcagggacactgtgctgacctgccttcctctccccgcccctcctcccacccagattctacaagggcactgtcccccgcctgggccgggtctgcctggatgtggccatagtgtttgtcatctatgatgaagtggtgaagctgctcaacaaagtgtggaagacggactaagcctagagaggccgcaaggggaccgccccaggcaccgcagagtgtctcgtacctttgtctcacatgattcagtgcagtagtgccaaaaggcccttccacgtcctcgagctctgtagcctggtctgtgcattgtggctgtcaaatccatgtgtcccccctgtggtctgtgtgtgacaccaccactgtgtcccagtgtctggcccagcatggcggtatgtgcatctggcctatgaccctgtgcccacttgtcatgtgcttactgtgaaccctgtgcctgtgtttcatgttctgtcacgtgaccctgtgccgcctcccggggtgcccgtgtggcctgggtcctcgccctgtagccctgccggtcccagtccggtgccttccaccctgccctggcctaccacagctgcctccggcctcggcctggcttcaccgcattccaggctgcagccccctgcttctcccgccattgccttaactgccctcgggccctctctccgccccggacagggtggcacccaccactctcaggaccaccctgccaaggcagaataaaccggatcctgttgc

SEQ ID NO: 6920 - DNA, 825 bp, Homo sapiens
  misc_feature (1)..(825): n=a,t,g or c
aagcttgatagcaagttcagcctggttaagtccaagctgaattccgtgcaccctgagccggagctgcccagtcgccgcgggaccggggccgctggggtctggacgggggtcgccatgatccgctttatcctcatccagaaccgggcaggcaagacgcgcctggccaagtggtacatgcagtttgatgatgatgagaaacagaagctgatcgaggaggtgcatgccgtggtcaccgtccgagacgccaaacacaccaactttgtggagttccggaactttaagatcatttaccgccgctatgctggcctctacttctgcatctgtgtggatgtcaatgacaacaaactggcttacctggagggcattcacaacttcgtggaggtcttaaacgaatatttccacaatgtctgtgaactggacctggtgttcaacttctacaaggtttacacggtcgtggacgagatgttcctggctggcgaaatccgagagaccagccagacgaaggtgctgaaacagctgctgatgctacagtccctggagtgagggcaggcgagcaccccaccccggccccggcccctcctggaatcgcctgctcgcttccccttcccaggcccgtggccaacccagcagtccttccctcaactgcctaggaggaagggacccagctgggtctgggccacaagggaggagacttcaccccacttcctctgggccctggctgtgggcagaggccaccgtgtgtgtcccgagtaaccgtgccgttgtcgtgtgattccataagcgtctgtgcgtggagtccccaataaacctgtggtcctgcctggc

SEQ ID NO: 6921 - DNA, 1965 bp, Homo sapiens
  misc_feature (1)..(1965): n=a,t,g or c
gagagacaaagaccccgaacacctccaacatgaagcttcttcatgttttcctgttatttctgtgcttccacttaaggttttgcaaggtcacttatacatctcaagaggatctggtggagaaaaagtgcttagcaaaaaaatatactcacctctcctgcgataaagtcttctgccagccatggcagagatgcattgagggcacctgtgtttgtaaactaccgtatcagtgcccaaagaatggcactgcagtgtgtgcaactaacaggagaagcttcccaacatactgtcaacaaaagagtttggaatgtcttcatccagggacaaagtttttaaataacggaacatgcacagccgaaggaaagtttagtgtttccttgaagcatggaaatacagattcagagggaatagttgaagtaaaacttgtggaccaagataagacaatgttcatatgcaaaagcagctggagcatgagggaagccaacgtggcctgccttgaccttgggtttcaacaaggtgctgatactcaaagaaggtttaagttgtctgatctctctataaattccactgaatgtctacatgtgcattgccgaggattagagaccagtttggctgaatgtacttttactaagagaagaactatgggttaccaggatttcgctgatgtggtttgttatacacagaaagcagattctccaatggatgacttctttcagtgtgtgaatgggaaatacatttctcagatgaaagcctgtgatggtatcaatgattgtggagaccaaagtgatgaactgtgttgtaaagcatgccaaggcaaaggcttccattgcaaatcgggtgtttgcattccaagccagtatcaatgcaatggtgaggtggactgcattacaggggaagatgaagttggctgtgcaggctttgcatctgtggctcaagaagaaacagaaattttgactgctgacatggatgcagaaagaagacggataaaatcattattacctaaactatcttgtggagttaaaaacagaatgcacattcgaaggaaacgaattgtgggaggaaagcgagcacaactgggagacctcccatggcaggtggcaattaaggatgccagtggaatcacctgtgggggaatttatattggtggctgttggattctgactgctgcacattgtctcagagccagtaaaactcatcgttaccaaatatggacaacagtagtagactggatacaccccgaccttaaacgtatagtaattgaatacgtggatagaattattttccatgaaaactacaatgcaggcacttaccaaaatgacatcgctttgattgaaatgaaaaaagacggaaacaaaaaagattgtgagctgcctcgttccatccctgcctgtgtcccctggtctccttacctattccaacctaatgatacatgcatcgtttctggctggggacgagaaaaagataacgaaagagtcttttcacttcagtggggtgaagttaaactaataagcaactgctctaagttttacggaaatcgtttctatgaaaaagaaatggaatgtgcaggtacatatgatggttccatcgatgcctgtaaaggggactctggaggccccttagtctgtatggatgccaacaatgtgacttatgtctggggtgttgtgagttggggggaaaactgtggaaaaccagagttcccaggtgtttacaccaaagtggccaattattttgactggattagctaccatgtaggaaggccttttatttctcagtacaatgtataaaattgtgatctctctcttcattctattctttttctctcaagagttccatttaatggaaataaaacggtataattaataattctctaggggggaaaaatgaagcaaatctcattggatatttttaaaggtctccacagagtttatgccatattggaattttgttgtataattctcnngcgaattc

SEQ ID NO: 6922 - DNA, 4797 bp, Homo sapiens
  misc_feature (1)..(4797): n=a,t,g or c
cctgggaccaaagtgctgcccagagctgagggtcctggagccacatgagaaggcttctccctgtgtacctgtgcagcacagggtagggtgagtccactcagctgtctaggagaggacccaggagcagcagagacncgccaagcctttactcataccatattctgatccttttccagcaaattgtggctactaatttgccccctgaagatcaagatggctctggggatgactctgacaacttctccggctcaggtgcaggtgaggttgtcatgggggccccccccacccaagacggcaacaggtcatgcctgggggcagtggtcaggcagtctcctgtgtttactgagcatgtactgagtgcaccctgcctgccctgtctccacccagctggctccaaagggcaatgctgaggagaggaatggggtcgtgagctgctgttaaggagagctcatgcttggaggtgaggtgaaggctgtgagctccagaaggccccagggcgcnctgctgcacgcaggctcatattcactaggaatagctttactcactaagaaacctctggaacccccttcagaaggttatttgactcctgagcctctattttctcatctgcaaaatgggaataataccttgacctgataagcttgtggagctgtaaggcagcacagagccagctggggtgtagctcttccatccaagctcccttccttacttcccctttcctgtggggactgggggagagaagtccctgagctggaggtggtcagggaagcttcacagaggaggtggctcttgagtggacctcaggaagaggggtgagagagctaaggaaggaggctgaggtcatccctggggaagtgacctagcggaggcctgagagctgcaaggtaggatatctgttgttggaagtgtctgttgttggaagtgggggcctttttttcagggagggtggggccagagaagtgtgtgccctgggataagtaggataaccacagtagttatgcccctaagggatgcccaccccacccctgtggtcacagaaaagctttcccaggtggcctaggcacctgtctcgtggctccagagacaggctgcacctgacacacacaatggaaggacagctctccttgtccattttccaaggagcttagcctcagctgccttgtccaggtactagcctccctcatagcctgagcttggccagcccaggtgctctggagcctcccccgacccacccaacacactctgcttctggtcctccccaccccccacctccccaacacactctgcttctggtcctgcaggtgctttgcaagatatcaccttgtcacagcagaccccctccacttggaaggacacgcagctcctgacggctattcccacgtctccagaacccaccggcctggaggctacagctgcctccacctccaccctgccggctggagaggggcccaaggagggagaggctgtagtcctgccagaagtggagcctggcctcaccgcccgggagcaggaggccaccccccgacccagggagaccacacagctcccgaccactcatcaggcctcaacgaccacagccaccacggcccaggagcccgccacctcccacccccacagggacatgcagcctggccaccatgagacctcaacccctgcaggacccagccaagctgaccttcacactccccacacagaggatggaggtccttctgccaccgagagggctgctgaggatggagcctccagtcagctcccagcagcagagggctctggggagcaggtgagtggcctctgcattccttgggaaattgagtgggttggtcctaatgcctggcacttggcaggccctacacctgtgccctgcgcgatctcgtattcctcaccaggaagacagggcacaggggccgccttcccctacccccagggcctcgcagagcaggacagactaactatgagatcagagcagaagcacccttaaagatcacccaagagagggctcccaaactcacaatccaaacttgcagccctcgtcgaagagtgaacgttataccagtcattttatttatagcttcgtggatttacgcttacactaaatagtctgctattcatacaaaatgtgtgctttgtatcactttttgtgatatccatgccatggtccagccagggtccggagttgatgtggcaagaaggcctggctttcgggccctgtgcgatcctggtttgggtgcatctgagtgggtggtggcaaagatcagggaggcaggagctgcttctgggtctgtagtggagctggttgctgctgctggcggtgacctggccaacccaatctgcccctgccctcccacaggacttcacctttgaaacctcgggggagaatacggctgtagtggccgtggagcctgaccgccggaaccagtccccagtggatcagggggccacgggggcctcacagggcctcctggacaggaaagaggtgctgggaggtgagttttctttcaggggggtagtttggggtgaattgctgctgtggggtcagggtggggctgaccacagccaaggccactgctttgggagggtctgcacgagagcccaaggagccgctgagctgagctggccccgtctacctgccctaggggtcattgccggaggcctcgtggggctcatctttgctgtgtgcctggtgggtttcatgctgtaccgcatgaagaagaaggacgaaggcagctactccttggaggagccgaaacaagccaacggcggggcctaccagaagcccaccaaacaggaggaattctatgcctgacgcgggagccatgcgccccctccgccctgccactcactaggcccccacttgcctcttccttgaagaactgcaggccctggcctcccctgccaccaggccacctccccagcattccagcccctctggtcgctcctgcccacggagtcgtgggtgtgctgggagctccactctgcttctctgacttctgcctggagacttagggcaccaggggtttctcgcataggacctttccaccacagccagcacctggcatcgcaccattctgactcggtttctccaaactgaagcagcctctccccaggtccagctctggaggggagggggatccgactgctttggacctaaatggcctcatgtggctggaagatcctgcgggtggggcttggggctcacacacctgtagcacttactggtaggaccaagcatcttgggggggtggccgctgagtggcaggggacaggagtcactttgtttcgtggggaggtctaatctagatatcgacttgtttttgcacatgtttcctctagttctttgttcatagcccagtagaccttgttacttctgaggtaagttaagtaagttgattcggtatccccccatcttgcttccctaatctatggtcgggagacagcatcagggttaagaagacttttttttttttttttaaactaggagaaccaaatctggaagccaaaatgtaggcttagtttgtgtgttgtctcttgagtttgtcgctcatgtgtgcaacagggtatggactatctgtctggtggccccgttctggtggtctgttggcaggctggccagtccaggctgccgtggggccgccgcctctttcaagcagtcgtgcctgtgtccatgcgctcagggccatgctgaggcctgggccgctgccacgttggagaagcccgtgtgagaagtgaatgctgggactcagccttcagacagagaggactgtagggagggcggcaggggcctggagatcctcctgcaggctcacgcccgtcctcctgtggcgccgtctccaggggctgcttcctcctggaaattgacgaggggtgtcttgggcagagctggctctgagcgcctccatccaaggccaggttctccgttagctcctgtggccccaccctgggccctgggctggaatcaggaatattttccaaagagtgatagtcttttgcttttggcaaaactctacttaatccaatgggtttttccctgtacagtagattttccaaatgtaataaactttaatataaagtagtctgtgaatgccactgccttcgcttcttgcctctgtgctgtgtgtgacgtgaccggacttttctgcaaacaccaacatgttgggaaacttggctcgaatctctgtgccttcgtctttcccatggggagggattctggttccagggtccctctgtgtatttgcttttttgttttggctgaaattctcctggaggtcggtaggttcagccaaggttttataaggctgatgtcaatttctgtgttgccaagctccaagcccatcttctaaatggcaaaggaaggtggatggccccagcacagcttgacctgaggctgtggtcacagcggaggtgtggagccgaggcctaccccncagacaccttggacatcctcctcccacccggctgcagaggccagannccagcccagggtcctgcacttacttgcttatttgacaacgtttcagcgactccgttggccactccgagagtgggccagtctgtggatcagagatgcaccaccaagccaagggaacctgtgtccggtattcgatactgcgactttctgcctggagtgtatgactgcacatgactcgggggtggggaaaggggtcggctgaccatgctcatctgctggtccgtgggacggtncccaagccagaggtgggttcatttgtgtaacgacaataaacggtacttgtcatttcgggcaacggctgctgtggtggtggttgagtctcttcttggcct

SEQ ID NO: 6923 - DNA, 993 bp, Homo sapiens
  misc_feature (1)..(993): n=a,t,g or c
cggcggcgcgcgatcgaggtcgggtcgccgtccagcctgcagcatgagcgcccccagcgcgacccccatcttcgcgcccggcgagaactgcagccccgcgtggggggcggcgcccgcggcctacgacgcagcggacacgcacctgcgcatcctgggcaagccggtgatggagcgctgggagaccccctatatgcacgcgctggccgccgccgcctcctccaaagggggccgggtcctggaggtgggctttggcatggccatcgcagcgtcaaaggtgcaggaggcgcccattgatgagcattggatcatcgagtgcaatgacggcgtcttccagcggctccgggactgggccccacggcagacacacaaggtcatccccttgaaaggcctgtgggaggatgtggcacccaccctgcctgacggtcactttgatgggatcctgtacgacacgtacccactctcggaggagacctggcacacacaccagttcaacttcatcaagaaccacgcctttcgcctgctgaagccggggggcgtcctcacctactgcaacctcacctcctggggggagctgatgaagtccaagtactcagacatcaccatcatgtttgaggagacgcaggtgcccgcgctgctggaggccggcttccggagggagaacatccgtacggaggtgatggcgctggtcccaccggccgactgccgctactacgccttcccacagatgatcacgcccctggtgaccaaaggctgagcccccaccccggcccggccacacccatgccctccgccgtgccttcctggccgggagtccagggtgtcgcaccagccctgggctgatcccagctgtgtgtcaccagaagctttcccggcttctctgtgaggggtcccaccagcccagggctgatcccagctgtgtgtcaccagcagctttcccagcttgctctgtgagggtcactgctgcccactgcagggtgccctgaggtgaagccg

SEQ ID NO: 6924 - DNA, 1044 bp, Homo sapiens
  misc_feature (1)..(1044): n=a,t,g or c
gaccggggcgtgcggagggatgtggcccggaatattggtagggggggcccgggtggcgtcatgcaggtaccccgcgctggggcctcgcctcgccgctcactttccagcgcagcggccgccgcagcggacactccagaacggcctggccctgcagcggtgcctgcacgcgacggcgacccgggctctcccgctcattcccatcgtggtggagcagacgggtcgcggcgagcgcgcctatgacatctactcgcggctgctgcgggagcgcatcgtgtgcgtcatgggcccgatcgatgacagcgttgccagccttgttatcgcacagctcctcttcctgcaatccgagagcaacaagaagcccatccacatgtacatcaacagccctggtggtgtggtgaccgcgggcctggccatctacgacacgatgcagtacatcctcaacccgatctgcacctggtgcgtgggccaggccgccagcatgggctccctgcttctcgccgccggcaccccaggcatgcgccactcgctccccaactcccgtatcatgatccaccagccctcaggaggcgcccggggccaagccacagacattgccatccaggcagaggagatcatgaagctcaagaagcagctctataacatctacgccaagcacaccaaacagagcctgcaggtgatcgagtccgccatggagagggaccgctacatgagccccatggaggcccaggagtttggcatcttagacaaggttctggtccaccctccccaggacggtgaggatgagcccacgctggtgcagaaggagcctgtagaagcagcgccggcagcagaacctgtcccagctagcacctgagagctgggcctcctctccagaatcatgtggaggggccagaggcttgccagacccccagctgggccctgctcaccccttgttgctgggcttggaggggcctcttgaggaacttttaatttgcaggggtgcccgctatggacggggcattccagctgagacactgtgattttaaattaaatctttgtggtctt

SEQ ID NO: 6925 - DNA, 145831 bp, Homo sapiens; identical to SEQ ID NO: 646
  misc_feature (1)..(145831): n=a,t,g or c

SEQ ID NO: 6926 - DNA, 1688 bp, Homo sapiens
  misc_feature (1)..(1688): n=a,t,g or c
gtgttaaagaaatcttactccaaggccttcacgctgaccatctctgccctctttgtgacacccaagacgactggggcccgggtggagttaagcgagcagcaactgcagttgtggccgagtgatgtggacaagctgtcacccactgacaacctgccgcgggggagccgcgcccacatcaccctcggctgtgcagctgacgtagaggccgtgcagacgggccttgacctcttagagattctgcggcaggagaaggggggcagccgaggcgaggaggtgggcgagctaagccggggcaagctctattccttgggcaatgggcgctggatgctgaccctggccaagaacatggaggtcagggccatcttcacggggtactacgggaaaggcaaacctgtgcccacgcaaggtagccggaaggggggcgccttgcagtcctgcaccatcatatgagtgttctcaccaccacttatgcccctagaagggaaggggagagggaaacgtgccctctgtttgatccttgttttgtgacatttttttttttttttttttttactcaaagttaacctacctgtaactttttaaaaacttgtaaaataactgaccctcccttcctgtccgccctcttcccctctaatgctcacgctcccaacacaaggtgggcagggaggcaccattcaggaacctggaccaaagctgacgaggctgggccaagccagggatggggccacagccagaaccccgagccctacttccaggttctggttagctcagccccagcccagcccagctgctctgcccagagctgggtgagtggggagacacctcagagccccgcaaaacccactgaccggaggcaaaaggcagtggggctgggggtagttttccatggtcacagagaactagtggtggctctgagaaggggaggacctctgggctttgattccatctccttgtcttttttctttgtttttagagacagggtcctgctatttcccaagctggagtgcagtggtgcgatcatggctcactgcagcctcgaactcctgggctcaagcaatcctcctgagtgatcccatttcttaatcagtgtagccccaagaaggctggggctatttaccagggtagaaaaaggagcttacctcccacctttggtcctaagtccctgccccctccccttcacaccataactaggtaacagtttgataactagggaagaaagcagaacagttaagcagccgccacatccccgctggctgggggcctcactccaggaaggggctggactggctgtcctttccagtggcctggctccgctgtgtggatggggccagaggcaggaaccctggtgaggaagctccagtcctgctctctacccagcccatcttgcctccatggtgcctctacctctgggcctcctctaacaggggctggtgggcaccaagagccaatggagtagacccctggctggtaagggccaagtcccaccggttgcttctgggaaggggtttctaacactagtctgtgtgctgtggttcctggggtgccctccactgccctctgttcagtaacagggccttgctaatcgggttgtcactcaacaaaagtgctttggatttaagttactatctggctttgcccaacctcagcaacctgtaagactgataatgaaataaatcatgttaatccta

SEQ ID NO: 6927 - DNA, 3117 bp, Homo sapiens
  misc_feature (1)..(3117): n=a,t,g or c
ccgcggagtgcagcgaccgcgccgccgctgagggaggcgccccaccatgccgcgggccccggcgccgctgtacgcctgcctcctggggctctgcgcgctcctgccccggctcgcaggtctcaacatatgcactagtggaagtgccacctcatgtgaagaatgtctgctaatccacccaaaatgtgcctggtgctccaaagaggacttcggaagcccacggtccatcacctctcggtgtgatctgagggcaaaccttgtcaaaaatggctgtggaggtgagatagagagcccagccagcagcttccatgtcctgaggagcctgcccctcagcagcaagggttcgggctctgcaggctgggacgtcattcagatgacaccacaggagattgccgtgaacctccggcccggtgacaagaccaccttccagctacaggttcgccaggtggaggactatcctgtggacctgtactacctgatggacctctccctgtccatgaaggatgacttggacaatatccggagcctgggcaccaaactcgcggaggagatgaggaagctcaccagcaacttccggttgggatttgggtcttttgttgataaggacatctctcctttctcctacacggcaccgaggtaccagaccaatccgtgcattggttacaagttgtttccaaattgcgtcccctcctttgggttccgccatctgctgcctctcacagacagagtggacagcttcaatgaggaagttcggaaacagagggtgtcccggaaccgagatgcccctgaggggggctttgatgcagtactccaggcagccgtctgcaaggagaagattggctggcgaaaggatgcactgcatttgctggtgttcacaacagatgatgtgccccacatcgcattggatggaaaattgggaggcctggtgcagccacacgatggccagtgccacctgaacgaggccaacgagtacactgcatccaaccagatggactatccatcccttgccttgcttggagagaaattggcagagaacaacatcaacctcatctttgcagtgacaaaaaaccattatatgctgtacaagaattttacagccctgatacctggaacaacggtggagattttagatggagactccaaaaatattattcaactgattattaatgcatacaatagtatccggtctaaagtggagttgtcagtctgggatcagcctgaggatcttaatctcttctttactgctacctgccaagatggggtatcctatcctggtcagaggaagtgtgagggtctgaagattggggacacggcatcttttgaagtatcattggaggcccgaagctgtcccagcagacacacggagcatgtgtttgccctgcggccggtgggattccgggacagcctggaggtgggggtcacctacaactgcacgtgcggctgcagcgtggggctggaacccaacagcgccaggtgcaacgggagcgggacctatgtctgcggcctgtgtgagtgcagccccggctacctgggcaccaggtgcgagtgccaggatggggagaaccagagcgtgtaccagaacctgtgccgggaggcagagggcaagccactgtgcagcgggcgtggggactgcagctgcaaccagtgctcctgcttcgagagcgagtttggcaagatctatgggcctttctgtgagtgcgacaacttctcctgtgccaggaacaagggagtcctctgctcaggccatggcgagtgtcactgcggggaatgcaagtgccatgcaggttacatcggggacaactgtaactgctcgacagacatcagcacatgccggggcagagatggccagatctgcagcgagcgtgggcactgtctctgtgggcagtgccaatgcacggagccgggggcctttggggagatgtgtgagaagtgccccacctgcccggatgcatgcagcaccaagagagattgcgtcgagtgcccgctgctccactctgggaaacctgacaaccagacctgccacagcctatgcagggatgaggtgatcacatgggtggacaccatcgtgaaagatgaccaggaggctgtgctatgtttctacaaaaccgccaaggactgcgtcatgatgttcacctatgtggagctccccagtgggaagtccaacctgaccgtcctcagggagccagagtgtggaaacacccccaacgccatgaccatcctcctggctgtggtcggtagcatcctccttgttgggcttgcactcctggctatctggaagctgcttgtcaccatccacgaccggagggagtttgcaaagtttcagagcgagcgatccagggcccgctatgaaatggcttcaaatccattatacagaaagcctatctccacgcacactgtggacttcaccttcaacaagttcaacaaatcctacaatggcactgtggactgatgtttccttctccgaggggctggagcggggatctgatgaaaaggtcagactgaaacgccttgcacggctgctcggcttgatcacagctccctaggtaggcaccacagagaagaccttctagtgagcctgggccaggagcccacagtgcctgtacaggaaggtgcctggccatgtcacctggctgctaggccagagccatgccaggctgcgtccctccgagcttgggataaagcaaggggaccttggcgctctcagctttccctgccacatccagcttgttgtcccaatgaaatactgagatgctgggctgtctctcccttccaggaatgctgggcccccagcctggccagacaagaagactgtcaggaagggtcggagtctgtaaaaccagcatacagtttggcttttttcacattgatcatttttatatgaaataaaaagatcctgcatttatggtgtagttctgagtcctgagacttttctgcgtgatggctatgccttgcacacaggtgttggtgatggggctgttgagatgcctgttgaaggtacatcgtttgcaaatgtcagtttcctctcctgtccgtgtttgtttagtacttttataatgaaaagaaacaagattgtttgggattggaagtaaagattaaaaccaaaagaatttgtgtttgtca

SEQ ID NO: 6928 - DNA, 2576 bp, Homo sapiens
  misc_feature (1)..(2576): n=a,t,g or c
gaattccgcagagatccagcaggtgctgcaccatgagtgtctctgtgctgagccccagcagactcctgggtgatgtctctggaatcctccaagcggcctccctgctcattctgcttctgctgctgatcaaggcagttcagctctacctgcacaggcagtggctgctcaaagccctccagcagttcccgtgccctccctcccactggctcttcgggcacatccaggagctccaacaggaccaggagctacaacggattcagaaatgggtggagacattcccaagtgcctgtcctcattggctatggggaggcaaagttcgtgtccagctctatgaccctgactatatgaaggtgattctggggagatcagacccgaaatcccatggttcctacagattcctggctccatggattgggtacggcttgctcctgttgaatgggcagacatggttccagcatcgacggatgctgaccccagccttccactatgacatcctgaagccctatgtggggctcatggcagactctgtacgagtgatgctggacaaatgggaagagctccttggccaggattcccctctggaggtctttcagcacgtctccttgatgaccctggacaccatcatgaagtgtgccttcagccatcagggcagcatccaggtggacaggaattctcagtcctacatacaggccattagtgacctgaacaacctggttttttcccgtgtgaggaatgcctttcaccagaatgacaccatctacagcctgacctctgctggccgctggacacaccgcgcctgccagctggcccatcagcacacagaccaagtgatccaactgaggaaggctcaactacagaaggagggggagctggagaagatcaagaggaagaggcatttggattttctggatatcctcctcttggccaaaatggagaatgggagcatcttgtcagacaaggacctccgtgctgaggtggacacgttcatgtttgagggccacgacaccacagccagtgggatctcctggatcctctatgctctggccacacaccccaagcatcaggagaggtgccgggaggagatccacagcctcctgggtgatggagcctccatcacctggaaccacctggaccagatgccctacaccaccatgtgcattaaggaggcactgaggctctacccaccggtgccaggcattggcagagagctcagcactcccgtcaccttccctgatgggcgctccttgcccaaaggtatcatggtcctcctctccatttatggccttcaccacaacccaaaagtgtggcccaacccagaggtgtttgaccctttccgttttgcaccgggttctgctcaacacagccacgctttcctgcccttctcaggaggatcaaggaactgcattgggaaacaatttgccatgaacgagctgaaggtggccacggccctgaccctgctccgctttgagctgctgcctgatcccaccaggatccccatccccattgcacgacttgtgttgaaatccaaaaatggaatccacctgcgtctcaggaggctccctaacccttgtgaagacaaggaccagctttgagggcctccacctgccgtcctgtcttcctgacccccgcttctgtccccttcctgtctgcccatatcctgttttctgtctgcccaccttcccttcttcccacctgcctgctgtcccccagtctgcctgcccttctctctctcacctttctccaggctccctacctgcttgtctacctgtctcctacccacctgtatctcttgttgggagaaaagctgagtgttgggagaagctgaggccgagcttgcatgtctgacataatgtaaaagagtcttgaatcatgtccaggatccagggtctaaaaccccttgtggcctttggaacaccaagctctgtgctgaagggtggaaggctaccctgacgcaccataatctaagcccggggcataaaacccctcgtggcttggatagaatccagggctcgtggctctggaatgtgtctggacttgctggctccttgctccttgctctcccaggatcaattgtatcttgagttaaaagaacctgctctccattatctcaagtaacagagcagatgctaaaccgtcacagctgtaaattgtgtgcttaatgcaacatgccctttcgacccaccccccattctcaccacctgtttctttgtttgatcaccaataaataatctgcacttccagagctcggggccttcacagcctccatccttagctttggcgccctggacccactttctctctcaaactgtcttttctcactgctttgactctgccggactttgtcacccccacgacctggtgttgggtctgaacaccccaacatccctgaatctccacccacctcccaaactcctgcctgccctccagactgtctgcccatacacctgtctccttcttcctgcctggcttgtctgttcctatattagtttcctattactgctgtaataaactatcacaatctcagtgattttaaataaaaaaaaaaaaaaaaaaaaaaaaaaaaaaaaacggaattc

SEQ ID NO: 6929 - DNA, 4646 bp, Homo sapiens
  misc_feature (1)..(4646): n=a,t,g or c
cctactctattcagatattctccagattcctaaagattagagatcatttctcattctcctaggagtactcacttcaggaagcaaccagataaaagagaggtgcaacggaagccagaacattcctcctggaaattcaacctgtttcgcagtttctcgaggaatcagcattcagtcaatccgggccgggagcagtcatctgtggtgaggctgattggctgggcaggaacagcgccggggcgtgggctgagcacagcgcttcgctctctttgccacaggaagcctgagctcattcgagtagcggctcttccaagctcaaagaagcagaggccgctgttcgtttcctttaggtctttccactaaagtcggagtatcttcttccaagatttcacgtcttggtggccgttccaaggagcgcgaggtcgggatggatcttgaaggggaccgcaatggaggagcaaagaagaagaacttttttaaactgaacaataaaagtgaaaaagataagaaggaaaagaaaccaactgtcagtgtattttcaatgtttcgctattcaaattggcttgacaagttgtatatggtggtgggaactttggctgccatcatccatggggctggacttcctctcatgatgctggtgtttggagaaatgacagatatctttgcaaatgcaggaaatttagaagatctgatgtcaaacatcactaatagaagtgatatcaatgatacagggttcttcatgaatctggaggaagacatgaccaggtatgcctattattacagtggaattggtgctggggtgctggttgctgcttacattcaggtttcattttggtgcctggcagctggaagacaaatacacaaaattagaaaacagttttttcatgctataatgcgacaggagataggctggtttgatgtgcacgatgttggggagcttaacacccgacttacagatgatgtctctaagattaatgaagttattggtgacaaaattggaatgttctttcagtcaatggcaacatttttcactgggtttatagtaggatttacacgtggttggaagctaacccttgtgattttggccatcagtcctgttcttggactgtcagctgctgtctgggcaaagatactatcttcatttactgataaagaactcttagcgtatgcaaaagctggagcagtagctgaagaggtcttggcagcaattagaactgtgattgcatttggaggacaaaagaaagaacttgaaaggtacaacaaaaatttagaagaagctaaaagaattgggataaagaaagctattacagccaatatttctataggtgctgctttcctgctgatctatgcatcttatgctctggccttctggtatgggaccaccttggtcctctcaggggaatattctattggacaagtactcactgtattcttttctgtattaattggggcttttagtgttggacaggcatctccaagcattgaagcatttgcaaatgcaagaggagcagcttatgaaatcttcaagataattgataataagccaagtattgacagctattcgaagagtgggcacaaaccagataatattaagggaaatttggaattcagaaatgttcacttcagttacccatctcgaaaagaagttaagatcttgaagggcctgaacctgaaggtgcagagtgggcagacggtggccctggttggaaacagtggctgtgggaagagcacaacagtccagctgatgcagaggctctatgaccccacagaggggatggtcagtgttgatggacaggatattaggaccataaatgtaaggtttctacgggaaatcattggtgtggtgagtcaggaacctgtattgtttgccaccacgatagctgaaaacattcgctatggccgtgaaaatgtcaccatggatgagattgagaaagctgtcaaggaagccaatgcctatgactttatcatgaaactgcctcataaatttgacaccctggttggagagagaggggcccagttgagtggtgggcagaagcagaggatcgccattgcacgtgccctggttcgcaaccccaagatcctcctgctggatgaggccacgtcagccttggacacagaaagcgaagcagtggttcaggtggctctggataaggccagaaaaggtcggaccaccattgtgatagctcatcgtttgtctacagttcgtaatgctgacgtcatcgctggtttcgatgatggagtcattgtggagaaaggaaatcatgatgaactcatgaaagagaaaggcatttacttcaaacttgtcacaatgcagacagcaggaaatgaagttgaattagaaaatgcagctgatgaatccaaaagtgaaattgatgccttggaaatgtcttcaaatgattcaagatccagtctaataagaaaaagatcaactcgtaggagtgtccgtggatcacaagcccaagacagaaagcttagtaccaaagaggctctggatgaaagtatacctccagtttccttttggaggattatgaagctaaatttaactgaatggccttattttgttgttggtgtattttgtgccattataaatggaggcctgcaaccagcatttgcaataatattttcaaagattataggggtttttacaagaattgatgatcctgaaacaaaacgacagaatagtaacttgttttcactattgtttctagcccttggaattatttcttttattacatttttccttcagggtttcacatttggcaaagctggagagatcctcaccaagcggctccgatacatggttttccgatccatgctcagacaggatgtgagttggtttgatgaccctaaaaacaccactggagcattgactaccaggctcgccaatgatgctgctcaagttaaaggggctataggttccaggcttgctgtaattacccagaatatagcaaatcttgggacaggaataattatatccttcatctatggttggcaactaacactgttactcttagcaattgtacccatcattgcaatagcaggagttgttgaaatgaaaatgttgtctggacaagcactgaaagataagaaagaactagaaggtgctgggaagatcgctactgaagcaatagaaaacttccgaaccgttgtttctttgactcaggagcagaagtttgaacatatgtatgctcagagtttgcaggtaccatacagaaactctttgaggaaagcacacatctttggaattacattttccttcacccaggcaatgatgtatttttcctatgctggatgtttccggtttggagcctacttggtggcacataaactcatgagctttgaggatgttctgttagtattttcagctgttgtctttggtgccatggccgtggggcaagtcagttcatttgctcctgactatgccaaagccaaaatatcagcagcccacatcatcatgatcattgaaaaaacccctttgattgacagctacagcacggaaggcctaatgccgaacacattggaaggaaatgtcacatttggtgaagttgtattcaactatcccacccgaccggacatcccagtgcttcagggactgagcctggaggtgaagaagggccagacgctggctctggtgggcagcagtggctgtgggaagagcacagtggtccagctcctggagcggttctacgaccccttggcagggaaagtgctgcttgatggcaaagaaataaagcgactgaatgttcagtggctccgagcacacctgggcatcgtgtcccaggagcccatcctgtttgactgcagcattgctgagaacattgcctatggagacaacagccgggtggtgtcacaggaagagatcgtgagggcagcaaaggaggccaacatacatgccttcatcgagtcactgcctaataaatatagcactaaagtaggagacaaaggaactcagctctctggtggccagaaacaacgcattgccatagctcgtgcccttgttagacagcctcatattttgcttttggatgaagccacgtcagctctggatacagaaagtgaaaaggttgtccaagaagccctggacaaagccagagaaggccgcacctgcattgtgattgctcaccgcctgtccaccatccagaatgcagacttaatagtggtgtttcagaatggcagagtcaaggagcatggcacgcatcagcagctgctggcacagaaaggcatctatttttcaatggtcagtgtccaggctggaacaaagcgccagtgaactctgactgtatgagatgttaaatactttttaatatttgtttagatatgacatttattcaaagttaaaagcaaacacttacagaattatgaagaggtatctgtttaacatttcctcagtcaagttcagagtcttcagagacttcgtaattaaaggaacagagtgagagacatcatcaagtggagagaaatcatagtttaaactgcattataaattttataacagaattaaagtagattttaaaagataaaatgtgtaattttgtttatattttcccatttggactgtaactgactgccttgctaaaagattatagaagtagcaaaaagtattgaaatgtttgcataaagtgtctataataaaactaaactttcatgtg

SEQ ID NO: 6930 - DNA, 1236 bp, Homo sapiens; identical to SEQ ID NO: 158
  misc_feature (1)..(1236): n=a,t,g or c

SEQ ID NO: 6931 - DNA, 4268 bp, Homo sapiens; identical to SEQ ID NO: 3320
  misc_feature (1)..(4268): n=a,t,g or c

SEQ ID NO: 6932 - DNA, 7695 bp, Homo sapiens
  misc_feature (1)..(7695): n=a,t,g or c
gcaacgaaggtaccatggccgttgtcgtcgccgccgcggctcccggggctggatggggggccgaggccagccagtggcacccggaagaaagagacgcggcggcggcgacgccgacaccctcaggacgagtgtccggacttgcccacagcctcaaggaggagacggcgaggcccggcccccgctgtccctggtgtaaagaagtcgccgtagccgtcgcggccgggactccccgggctctcgcccttcaggtttcgttgacactcaggaccgtacgtacgctgcgccatgttcaagaaactgaagcaaaagatcagcgaggagcagcagcagctccagcaggcgctggctcctgctcaggcgtcctccaattcttcaacaccaacaagaatgaggagcaggacatcttcatttacagagcaacttgatgaaggtacacccaatagagagtcaggtgacacacagtcttttgcacagaagctccagctccgggtgccctccgtggagtctttgtttcgaagtccgataaaggaatctctattccggtcttcttctaaagagtctttggtacgaacatcttccagagaatccctgaatcgacttgacctggacagttctactgccagttttgatccaccctctgatatggatagcgaggctgaagacttggtagggaattcagacagtctcaacaaagaacagttgattcagcggttgcgaagaatggaacgaagcttaagtagctacaggggaaaatattctgagcttgttacagcttatcagatgcttcagagagagaagaaaaagctacaaggtatattaagtcagagtcaggataaatcacttcggagaatagcagaattaagagaggagctccaaatggaccagcaggcaaagaaacatctgcaagaggagtttgatgcatctttagaggagaaagatcagtatatcagtgttctccaaactcaggtttctctactgaaacaacgattacgaaatggcccgatgaatgttgatgtactgaaaccacttcctcagctggaaccacaggctgaagtcttcactaaagaagagaatccagaaagtgatggagagccagtagtggaagatggaacttctgtaaaaacactggaaacactccagcaaagagtgaagcgtcaagagaacctacttaagcgttgtaaggaaacaattcagtcacataaggaacaatgtacactattaactagtgaaaaagaagctctgcaagaacaactggatgaaagacttcaagaactagaaaagataaaggaccttcatatggccgagaagactaaacttatcactcagttgcgtgatgcaaagaacttaattgaacagcttgaacaagataagggaatggtaatcgcagagacaaaacgtcagatgcatgaaaccctggaaatgaaagaagaagaaattgctcaactccgtagtcgcatcaaacagatgactacccagggagaggaattacgggaacagaaagaaaagtccgaaagagctgcttttgaggaacttgaaaaagctttgagtacagcccaaaaaacagaggaagcacggagaaaactgaaggcagaaatggatgaacaaataaaaactatcgaaaaaacaagtgaggaggaacgcatcagtcttcaacaggaattaagtcgggtgaaacaggaggttgttgatgtaatgaaaaaatcctcagaagaacaaattgctaagctacagaagcttcatgaaaaggagctggccagaaaagagcaggaactgaccaagaagcttcagacccgagaaagggaatttcaggaacaaatgaaagtagctcttgaaaagagtcaatcagaatatttgaagatcagccaagaaaaagaacagcaagaatctttggccctagaagagttagagttgcagaaaaaagcaatcctcacagaaagtgaaaataaacttcgggaccttcagcaagaagcagagacttacagaactagaattcttgaattggaaagttctttggaaaaaagcttacaagaaaacaaaaatcagtcaaaagatttggctgttcatctggaagctgaaaaaaataagcacaataaggagattacagtcatggttgaaaaacacaagacagaattggaaagccttaagcatcagcaggatgccctttggactgaaaaactccaagtcttaaagcaacaatatcagactgaaatggaaaaacttagggaaaagtgtgaacaagaaaaagaaacattgttgaaagacaaagagattatcttccaggcccacatagaagaaatgaatgaaaagactttagaaaagcttgatgtgaagcaaacagaactagaatcattatcttctgaactgtcagaagtattaaaagcccgtcacaaactagaagaggaactttctgttctgaaagatcaaacagataaaatgaagcaggaattagaggccaagatggatgaacagaaaaatcatcaccagcagcaagttgacagtatcattaaagaacacgaggtatctatccagaggactgagaaggcattaaaagatcaaattaatcaacttgagcttctcttgaaggaaagggacaagcatttgaaagagcatcaggctcatgtagaaaatttagaggcagatattaaaaggtctgaaggggaactccagcaggcatctgctaagctggacgtttttcagtcttaccagagtgccacacatgagcagacaaaagcatatgaggaacagttggcccaattgcagcagaagttgttggatttggaaacagaaagaattcttcttaccaaacaggttgctgaagttgaagcacaaaagaaagatgtttgtactgagttagatgctcacaaaatccaggtgcaggacttaatgcagcaacttgaaaaacaaaatagtgaaatggagcaaaaagtaaaatctttaacccaagtctatgagtccaaacttgaagatggtaacaaagaacaggaacagacaaagcaaatcttggtggaaaaggaaaatatgattttacaaatgagagaaggacagaagaaagaaattgagatactcacacagaaattgtcagccaaggaggacagtattcatattttgaatgaggaatatgaaaccaaatttaaaaaccaagaaaaaaagatggaaaaagttaagcagaaagcaaaggagatgcaagaaacgttaaagaaaaaattactggatcaggaagccaaacttaagaaagagcttgaaaatactgctctagagcttagtcagaaagaaaaacagtttaatgccaaaatgctggaaatggcacaggctaactcagctggaatcagtgatgcagtgtcaagactggaaacaaaccaaaaagaacaaatagaaagtcttactgaggttcatcgacgagaactcaatgatgtcatatcaatctgggaaaagaaacttaatcagcaagctgaagaacttcaggaaatacatgaaatccaattacaggaaaaagaacaagaggtagcagaactgaaacaaaagatcctcctatttgggtgtgaaaaagaagagatgaacaaggaaataacatggctgaaggaagaaggtgttaagcaggatacaacattaaatgaattacaggaacagttaaagcagaagtctgcccatgtgaattctcttgcacaagatgaaactaaactgaaagctcatcttgaaaagctagaggttgacttgaataagtctctgaaggaaaatacttttcttcaagagcagctagttgaactgaagatgctggcagaagaagataagcggaaggtttctgagttgactagcaagttgaaaaccacagatgaagaattccagagtttgaaatcttcacatgaaaaaagtaacaaaagcctagaggacaagagcttggaatttaaaaaactgtctgaggaactagcgattcagctagatatttgctgtaagaaaaccgaagccttattagaagctaaaacaaatgagctaatcaacattagtagtagtaaaactaatgccattctttctaggatttctcattgtcagcaccgtacaactaaagttaaggaggcactgttaattaaaacttgcacagtttctgaattagaagcacaacttagacagttgacagaggagcaaaatacactaaatatttcttttcaacaggctactcatcagttagaagaaaaagaaaatcaaattaagagcatgaaggctgatattgaaagtcttgtaacagaaaaagaagccttacagaaggaaggaggcaatcagcaacaggctgcttctgaaaaggagtcttgtataacacagttgaagaaagagttatctgaaaacatcaatgctgtcacattgatgaaagaagagcttaaagaaaaaaaagttgagattagcagtcttagtaaacaactaactgatttgaatgttcagcttcaaaatagcatcagcctatccgaaaaagaagcagccatttcatcactaagaaagcagtatgatgaagaaaaatgtgaattgctggatcaggtgcaagatttatcttttaaagttgacactctgagtaaagagaaaatttctgctcttgagcaggtagatgactggtccaataaattctcagaatggaagaagaaagcacagtcaagatttacacagcatcaaaacactgttaaagaattgcagatccagcttgagttaaaatcaaaggaagcttatgaaaaggatgagcagataaatttattgaaggaagagcttgatcagcaaaataaaagatttgattgtttaaagggtgaaatggaagacgacaagagcaagatggagaaaaaggagtctaatttagaaacagagttaaagtctcaaacagcaagaattatggaattagaggaccatattacccagaaaactattgaaatagagtccttaaatgaagttcttaaaaattacaatcaacaaaaggatattgaacacaaagaattggttcagaaacttcaacattttcaagagttaggagaagaaaaggacaacagggttaaagaagctgaagaaaaaatcttaacacttgaaaaccaagtttattccatgaaagctgaacttgaaactaagaagaaagaattagaacatgtgaatttaagtgtgaaaagcaaagaggaggagttaaaggcattggaagataggcttgagtcagaaagtgctgcaaaattagcagagttgaagagaaaagctgaacaaaaaattgctgccattaagaagcagttgttatctcaaatggaagagaaagaagaacagtataaaaaaggtacagaaagccatttgagtgagctaaatacaaaattgcaggaaagagaaagggaagttcacatcttggaagaaaaacttaagtcagtggaaagttcacagtcagaaacattaattgtacccagatcagcaaaaaatgtggcagcatatactgaacaagaagaagcagattcccaaggctgtgtgcagaagacatatgaagaaaaaatcagtgttttacaaagaaacttaactgaaaaagaaaagctattgcagagggtagggcaggaaaaagaagagacagtttcttctcattttgaaatgcgatgccaataccaggagcgcttaataaagctagaacatgctgaggcaaagcaacatgaagatcaaagtatgataggtcatcttcaagaggagcttgaagaaaaaaacaagaaatattccttgatagtagcccagcatgtggaaaaagaaggaggtaaaaataacatacaggcaaagcaaaacttggaaaatgtgtttgacgacgtccagaaaaccctccaggagaaggaactaacctgtcagattttggagcaaaagataaaagagctggattcctgcttagtaagacagaaagaagtacatagagttgaaatggaagagttgacctcaaaatatgaaaaattacaggctttacaacagatggatggaagaaataaacccacagaacttttggaagaaaacactgaagaaaagtccaaatcacatttggtccaacccaaattgcttagtaacatggaagcccagcacaatgatctggagtttaaattagccggggcagaacgggagaaacagaaactgggcaaggagattgttagattgcagaaagaccttcgaatgttgagaaaggagcatcagcaagaattggaaatactaaagaaagaatatgatcaagaaagggaagagaaaatcaaacaggagcaggaagatcttgaactgaagcacaattccacattaaaacagctgatgagggagtttaatacacagctggcacaaaaggaacaagagctggaaatgaccataaaagaaactatcaataaggcccaggaggtggaggctgaacttttagaaagccatcaagaagagacaaatcagttacttaaaaaaattgctgagaaagatgatgatctaaaacgaacagccaaaagatatgaagaaatccttgatgctcgtgaagaagaaatgactgcaaaagtaagggacctgcagactcaacttgaggagctgcagaagaaataccagcaaaagctagagcaggaggagaaccctggcaatgataatgtaacaattatggagctacagacacagctagcacagaagacgactttaatcagtgattcgaaattgaaagagcaagagttcagagaacagattcacaatttagaagaccgtttgaagaaatatgaaaagaatgtatatgcaacaactgtggggacaccttacaaaggtggcaatttgtaccatacggatgtctcactctttggagaacctaccgaatttgagtatttgcgaaaagtgctttttgagtatatgatgggtcgtgagactaagaccatggcaaaagttataaccaccgtactgaagttccctgatgatcagactcagaaaattttggaaagagaagatgctcggctgatgtttacttcacctcgcagtggtatcttctgagtaaaccatcagtctgtgcttagttaacatgtgtcatggctccgatcttcatcttgaagaagagtgacattgggtgactgctgcttggaaaactgtccacacttgctactctttgagaatgaagttgtcattcagggcccctcatgtagccaaaagaccaagaaaaatctggcccacagataagttgcagactgcctttaaaatagattttatcagtggagaaatggtgatagttttttcttcagttttctcttgggaaggagttttatgttgtttaaaagatattttgataacttaacctgctttatgggcttacataatattcctttcatccattctttttaaagaacggcttacctttcctatttatttttagggtgattttttaaaaagacttgtgcaatacattttgaggtgaaacttagtggattttttctgataaattagagcatttaattgactattttattcaggttgatctgttgaatatttgctaaagaccagttctttaagctaagacatgtaaaaaatcccaaatggcagtacctcattgtttacttagcttttgtacttatatttttcagaggaaaaaacactactgtaaattgtgaatagccaatacataactgtattgtatgcaaatctgtgattgttggcagtgtcatctctgagaaacagataaataaagtttatttactataaaaaaaaaaaaaaaag

SEQ ID NO: 6933 - DNA, 3223 bp, Homo sapiens
  misc_feature (1)..(3223): n=a,t,g or c
cgagtttgaggcagcgctagcggtgaatcggggccctcaccatgagttcctcgcctgttaatgtaaaaaagctgaaggtgtcggagctgaaagaggagctcaagaagcgacgcctttctgacaagggtctcaaggccgagctcatggagcgactccaggctgcgctggacgacgaggaggccgggggccgccccgccatggagcccgggaacggcagcctagacctgggcggggattccgctgggcgctcgggagcaggcctcgagcaggaggccgcggccggcggcgatgaagaggaggaagaagaggaagaggaggaggaaggaatctccgctctggacggcgaccagatggagctaggagaggagaacggggccgcgggggcggccgactcgggcccgatggaggaggaggaggccgcctcggaagacgagaacggcgacgatcagggtttccaggaaggggaagatgagctcggggacgaagaggaaggcgcgggcgacgagaacgggcacggggagcagcagcctcaaccgccggcgacgcagcagcaacagccccaacagcagcgcggggccgccaaggaggccgcggggaagagcagcggccccacctcgctgttcgcggtgacggtggcgccgcccggggcgaggcagggccagcagcaggcgggaggggacggcaaaacagaacagaaaggcggagataaaaagaggggtgttaaaagaccacgagaagatcatggccgtggatattttgagtacattgaagagaacaagtatagcagagccaaatctcctcagccacctgttgaagaagaagatgaacacttcgatgacacagtggtttgtcttgatacttataattgtgatctacattttaaaatatcaagagatcgtctcagtgcttcttcccttacaatggagagttttgcttttctttgggctggaggaagagcatcctatggtgtgtcaaaaggcaaagtgtgttttgagatgaaggttacagagaagatcccagtaaggcatttatatacaaaagatattgacatacatgaagttcgtattggctggtcactaactacaagtggaatgttacttggtgaagaagaattttcttatgggtattctctaaaaggaataaaaacatgcaactgtgagactgaagattatggagaaaagtttgatgaaaatgatgtgattacatgttttgctaactttgaaagtgatgaagtagaactctcgtatgctaagaatggacaagatcttggcgttgccttcaaaatcagtaaggaagttcttgctggacggccactgttcccgcatgttctctgccacaactgtgcagttgaatttaattttggtcagaaggaaaagccatattttccaatacctgaagagtatactttcatccagaacgtccccttagaggatcgagttagaggaccaaaggggcctgaagagaagaaagattgtgaagttgtgatgatgattggcttgccaggagctggaaaaactacctgggttactaaacatgcagcagaaaatccagggaaatataacattcttggcacaaatactattatggataagatgatggtggcaggttttaagaagcaaatggcagatactggaaaactgaacacactgttgcagagagccccccagtgtcttgggaaatttattgagattgctgcccgaaagaagcgaaattttattctggatcagacaaatgtgtctgctgctgcccagaggagaaaaatgtgcctgtttgcaggcttccagcgaaaagctgttgtagtttgcccaaaagatgaagactataagcaaagaacacagaagaaagcagaagtagaggggaaagacctaccagaacatgcggtcctcaaaatgaaaggaaactttaccctcccagaggtagctgagtgctttgatgaaataacctatgttgaacttcagaaggaagaagcccaaaaactcttggagcaatataaggaagaaagcaaaaaggctcttccaccagaaaagaaacagaacactggctcaaagaaaagcaataaaaataagagtggcaagaaccagtttaacagaggtggtggccatagaggacgtggaggactcaatatgcgtggtggaaatttcagaggaggagcccctgggaatcgtggcggatataataggaggggcaacatgccacagagaggtggtggcggtggaggaagtggtggaatcggctatccataccctcgtgcccctgtttttcctggccgtggtagttactcaaacagagggaactacaacagaggtggaatgcccaacagagggaactacaaccagaacttcagaggacgaggaaacaatcgtggctacaaaaatcaatctcagggctacaaccagtggcagcagggtcaattctggggtcagaagccatggagtcagcattatcaccaaggatattattgaatacccaaataaaacgaactgatacatatttctccaaaaccttcacaagaagtcgactgttttctttagtaggctaactttttaaacattccacaagaggaagtgcctgcgggttccttttttagaagctttgtgggttgattttttttcttttcttttttgtacatttttaattgcagtttaaaagtgaatcgtaagagaacctcagcattgtgcacgataagagaatgtgtcagtatttcagggttctacatttatctgtaaaatgtgacttttttttttttttatcacaacagaagtaaaatgttgctttgtacctggtgtcttttattaagaatttactccccccatttctcacagagaataacagtcgggagtcattgtcacaatataatagaaatgttagcaaccagattcatgtaaggactaagtggtcctcatgaattgcattaagactctgtactgctcatattacactccatcctctctgtagtttgctgggtagtggagggggtaagctaaatcatagtttctgacaataactgggaaggttttttcttaaaataacaatggaattggtataattgggattgaaaactaaaacttggaactaagatagagaagatggagtgtatgtagaagggctgttaaaaatgtaaaacttggttgcattatttgtggaggctcaaacttgtgaaggttaataccataatttttccatttgttctgcattttgattctgaaaagaaagctggctttgc

SEQ ID NO: 6934 - DNA, 3653 bp, Homo sapiens
  misc_feature (1)..(3653): n=a,t,g or c
attgcaacacatgcagctgcctggagagagggagccggtgtcctacgtcagagccgccgccgccgcgagccgccgccggggaggagcagccgctgccgcccaggactgggcccttagggaggaggaggcgagaagatggcggacgaccccagtgctgccgacaggaacgtggagatctggaagatcaagaagctcattaagagcttggaggcggcccgcggcaatggcaccagcatgatatcattgatcattcctcccaaagaccagatttcacgagtggcaaaaatgttagcggatgagtttggaactgcatctaacattaagtcacgagtaaaccgcctttcagtcctgggagccattacatctgtacaacaaagactcaaactttataacaaagtacctccaaatggtctggttgtatactgtggaacaattgtaacagaagaaggaaaggaaaagaaagtcaacattgactttgaacctttcaaaccaattaatacgtcattgtatttgtgtgacaacaaattccatacagaggctcttacagcactactttcagatgatagcaagtttggattcattgtaatagatggtagtggtgcactttttggcacactccaaggaaacacaagagaagtcctgcacaaattcactgtggatctcccaaagaaacacggtagaggaggtcagtcagccttgcgttttgcccgtttaagaatggaaaagcgacataactatgttcggaaagtagcagagactgctgtgcagctgtttatttctggggacaaagtgaatgtggctggtctagttttagctggatccgctgactttaaaactgaactaagtcaatctgatatgtttgatcagaggttacaatcaaaagttttaaaattagttgatatatcctatggtggtgaaaatggattcaaccaagctattgagttatctactgaagtcctctccaacgtgaaattcattcaagagaagaaattaataggacgatactttgatgaaatcagccaggacacgggcaagtactgttttggcgttgaagatacactaaaggctttggaaatgggagctgtagaaattctaatagtctatgaaaatctggatataatgagatatgttcttcattgccaaggcacagaagaggagaaaattctctatctaactccagagcaagaaaaggataaatctcatttcacagacaaagagaccggacaggaacatgagcttatcgagagcatgcccctgttggaatggtttgctaacaactataaaaaatttggagctacgttggaaattgtcacagataaatcacaagaagggtctcagtttgtgaaaggatttggtggaattggaggtatcttgcggtaccgagtagatttccagggaatggaataccaaggaggagacgatgaattttttgaccttgatgactactaggtagtcgacatgggtccggcaaaacgtgcctcaccctccagcatccaacccaaggagcatacccatggtggaatccaaacagatccctgccttacaattggaacatttccagaacttaatccatgagcattggatattgaaaagaaaaccgaaacaaaaccagacccagccctacactttggtttgtcatggtgtcagcgcagcagcctacaactaagttcctaaacgccactttggactaatttaaaaaagaatcccagtttttacttttactggatggtgaaattggttgctcttgtattttatgaaaaaaaatgatttttttaaccttcatacatagaagcaaaaatactttaactgctgtaaaccttcaaaagttaatagaagtgagatcatactggtttgtttcttattttgattggagaaaaattaaattgctgcatttcgcagtgacccatttacatggcattctcagcttagactgcgtaagaagaaatatatgtggtgaaatgttggaaccatttctctcttggtctctgtttaatgttgaaagggtgagctaataggaggcactttcaacttcactccctcacgctaccccgtccccctccagactggcagtttcaaggatgcaaattgcattgcaaaatcaaactgactcatgaagcatttgggccagtgcactgtttacttccatctgtttgcagacacatttgtgcccggcgtttgggagccctttgtatcaatgttctgacaagggtccctataaccttaacctactcgaaaccggtttgggatggatatgatggggcttctgtgctattgctgggattgggagaaataaaacatgcaatttaagtggaagcgaagaaatttaaagaggattttattttgcttgggtcaatccttgttaaaagggaggtggatgtgtttccttgtgttggatggcatgagattatgtgaatgttttgatttattaaaatgaactgcaaggtttttcacaggaacgacagacatgtatgactgcatgtaattataaactcctgacctcctggtggggttggagcatctgtttcaaatgtgggacttacaagcacttctcacatgagaaattaggggcgggtgggaagggatgggacacagcttctggcaccatggatttaagaccatgttggatccaaaagttggcctgaaaccctgaagctgatgcttcacagctgggctgtaagtcagacttgaacccagctgatatgcaaggtcatggcgtgccagggtggtgacagttgaacaaagtgtatagtacgtgcccagtggtagcgatggaaaaaagtataccaaatggactttgaaggaccaaaggttttaaaagtcaattggtatcacctccacactgactagggtagtggggtgcatttggttttcaaattgggtacttttaacactttagtgcctgactgctgttctttactgacttgattcagtcactcgtagctttattggtctgaaccagctccttgttcccaggttacagacctgcctatcgttccaataatcctgtttcacttgaatgaagggagtatgtcttaaatgtaaagtttctggttctcacactgtactctgaggtccaaatactgtctgtcaatgtgtaacctgatgtctcaaccccctgtgagaagagtccattatttggtgttcaccaacgtgggagacttcaccggaacaggcttttttgctttgggctctgctatttgtttgcagaacacccaagagcgagcaaacacgctctcttcacagcagtaccttagggttttgccattgtaaatgggtctgatgtgatatgacaagaccagagaaattggatgtaaatttacatttttgaatatgcttgttgtttcacatgatacatttagggtatgcagctccttttgtagtttttatttttactatttaagtttggaaatgatgccaaatttttgtatttctttaatcaatgtgttctcttcggtgatatatattgcattatatattgatgtgtgtatcaatatatattgatatgtattacacttacacatacaaacacatataagagggggtgaaaaccgtagcctttgcattctctatagcctctgcagagagatactaagcagcaaaatcttggtgttgtgatgtacagaaatggagaagagtattaaaccatatttaag

SEQ ID NO: 6935 - DNA, 2301 bp, Homo sapiens
  misc_feature (1)..(2301): n=a,t,g or c
ttttgcagagcagtcattatggcgaaccttggctgctggatgctggttctctttgtggccacatggagtgacctgggcctctgcaagaagcgcccgaagcctggaggatggaacactgggggcagccgatacccggggcagggcagccctggaggcaaccgctacccacctcagggcggtggtggctgggggcagcctcatggtggtggctgggggcagcctcatggtggtggctgggggcagccccatggtggtggctggggtcaaggaggtggcacccacagtcagtggaacaagccgagtaagccaaaaaccaacatgaagcacatggctggtgctgcagcagctggggcagtggtggggggccttggcggctacatgctgggaagtgccatgagcaggcccatcatacatttcggcagtgactatgaggaccgctactatcgtgaaaacatgcaccgttaccccaaccaagtgtactacaggcccatggatgagtacagcaaccagaacaactttgtgcacgactgcgtcaatatcacaatcaagcagcacacggtcaccacaaccaccaagggggagaacttcaccgagaccgacgttaagatgatggagcgcgtggttgagcagatgtgtatcacccagtacgagagggaatctcaggcctattaccagagaggatcgagcatggtcctcttctcctctccacctgtgatcctcctgatctctttcctcatcttcctgatagtgggatgaggaaggtcttcctgttttcaccatctttctaatctttttccagcttgagggaggcggtatccacctgcagcccttttagtggtggtgtctcactctttcttctctctttgtcccggataggctaatcaatacccttggcactgatgggcactggaaaacatagagtagacctgagatgctggtcaagccccctttgattgagttcatcatgagccgttgctaatgccaggccagtaaaagtataacagcaaataaccattggttgtctgaaatacctttgcctggatacctctggctccttcagcagctagagctcagtatactaatgccctatcttagtagagatttcatagctatttagagatattttccattttaagaaaacccgacaacatttctgccaggtttgttaggaggccacatgatacttattcaaaaaaatcctagagattcttagctcttgggatgcaggctcagccgctggagcatgagctctgtgtgtaccgagaactggggtgatgttttacttttcacagtatgggctacacagcagctgttcaacaagagtaaatattgtcacaacactgaacctctggctagaggacatattcacagtgaacataactgtaacatatatgaaaggcttctgggacttgaaatcaaatgtttgggaatggtgcccttggaggcaacctcccattttagatgtttaaaggaccctatatgtggcattcctttctttaaactataggtaattaaggcagctgaaaagtaaattgccttctagacactgaaggcaaatctcctttgtccatttacctggaaaccagaatgattttgacatacaggagagctgcagttgtgaaagcaccatcatcatagaggatgatgtaattaaaaaatggtcagtgtgcaaagaaaagaactgcttgcatttctttatttctgtctcataattgtcaaaaaccagaattaggtcaagttcatagtttctgtaattggcttttgaatcaaagaatagggagacaatctaaaaaatatcttaggttggagatgacagaaatatgattgatttgaagtggaaaaagaaattctgttaatgttaattaaagtaaaattattccctgaattgtttgatattgtcacctagcagatatgtattacttttctgcaatgttattattggcttgcactttgtgagtattctatgtaaaaatatatatgtatataaaatatatattgcataggacagacttaggagttttgtttagagcagttaacatctgaagtgtctaatgcattaacttttgtaaggtactgaatacttaatatgtgggaaacccttttgcgtggtccttaggcttacaatgtgcactgaatcgtttcatgtaagaatccaaagtggacaccattaacaggtctttgaaatatgcatgtactttatattttctatatttgtaactttgcatgttcttgttttgttatataaaaaaattgtaaatgtttaatatctgactgaaattaaacgagcgaagatgagcacca

SEQ ID NO: 6936 - DNA, 1763 bp, Homo sapiens; identical to SEQ ID NO: 6608
  misc_feature (1)..(1763): n=a,t,g or c

SEQ ID NO: 6937 - DNA, 4494 bp, Homo sapiens
  misc_feature (1)..(4494): n=a,t,g or c
gccggatgagttgcttttaggcttgctggcccgcggggctgtccaggcacgcgaggcccctcaggtacgccctctcttccctgcaggatccggccctcaaagacgagggtcacgcacgcgttacaaccccgaaacagtagcacaagatttaatttttaaaagagcgtgtttcttcggggcttgccgttcgttcgtttccagcctcaggaatttatggtcgcctttttgaatgagcaacaaaatgcttcaacaagttccagaaaacataaattttcctgctgaagaagagaaaatcttggagttttggactgaatttaattgttttcaggaatgcttaaagcaatcaaaacataaaccaaaatttaccttctatgatggtcctccttttgcaactggactgcctcactatggacatatacttgcgggtacaattaaagatatagttacaagatatgctcaccagagtgggtttcatgttgacagaagatttggatgggattgccatggcttacctgtggaatatgaaattgataagacactgggaatcagaggaccagaggatgtggccaaaatggggattacagagtataacaatcagtgccgagcaattgtgatgagatattctgctgagtggaagtctactgttagcagacttggccgatggattgactttgacaatgactataaaactctgtatccacaattcatggaatcagtctggtgggtcttcaaacaactctatgataaaggccttgtttatagaggtgtgaaagtcatgcccttctctacggcatgtaacactccactttccaacttcgagtcacaccagaattataaggatgttcaagatccttcagtatttgtaactttccctttggaagaagatgaaactgtatctttagttgcttggacaaccactccctggactctacctagtaaccttgctgtgtgtgttaatccagaaatgcaatatgtgaaaattaaagatgttgccagaggacgattactcattttaatggaagccagattgtcagccctctataaattggagagtgactatgagatccttgaaagatttcctggtgcctatcttaaaggcaagaagtacaggcccctgtttgactatttcctgaagtgtaaagagaatggcgctttcactgtgcttgttgacaactatgtgaaggaagaagaaggcacaggggttgtccaccaagctccttacttcggtgctgaggactatcgggtctgtatggactttaacattattcggaaagactcactccctgtttgccctgtggatgcttcaggctgcttcacaacggaggtgacagatttcgcaggacagtatgtgaaggatgctgacaaaagtatcatcaggactttgaaggaacaaggccgacttctggttgccaccaccttcactcacagctaccctttttgctggagatcagacactcctctaatttacaaagcagtgcccagctggtttgtgcgagtggagaacatggtggaccagctcctaaggaacaatgacctgtgctactgggtcccagagttggtacgagaaaaacgatttggaaattggctgaaagatgcacgtgactggacaatttccagaaacagatactggggcacccccatcccactgtgggtcagcgatgactttgaggaggtggtatgcattgggtcagtggcggaacttgaagaactgtcaggagcaaagatctcagatctccacagagagagtgttgaccacctgaccattccttcacgctgtgggaagggatccttgcaccgcatctctgaagtgtttgactgttggtttgagagtggcagcatgccctatgctcaggttcattacccgtttgaaaacaagagggagtttgaggatgcttttcctgcagatttcattgccgagggcatcgaccaaaccagaggatggttttataccctgctggtgctggccacggccctctttggacaaccgcctttcaagaacgtaattgtgaatgggcttgtcctggcaagtgatggccaaaaaatgagcaaacggaaaaagaattatccagatccagtttccatcatccagaagtatggtgctgatgccctcagattatatctgattaactcccctgtggtgagagcagaaaacctccgctttaaagaagagggtgtgcgggacgtccttaaggatgtactgctcccatggtacaatgcctatcgcttcttaatccagaacgttctgaggctccagaaggaggaagaaatagaatttctctacaatgagaacacggttagagaaagccccaacattacagaccggtggatcctgtccttcatgcagtctctcattggcttctttgagactgaaatggcagcttataggctttatactgtggtgcctcgcctggtcaagtttgtagatattctgaccaattggtatgttagaatgaaccgcagaagattaaagggtgaaaatgggatggaggattgtgtcatggccctagaaaccttgtttagtgttctgctttctctttgcagacttatggctccctacacaccttttctcactgaattgatgtaccagaatctaaaggtgctgattgaccctgtttctgttcaggacaaggacacactcagcattcactacctcatgctgccccgtgttcgagaagaattgattgacaagaaaacagagagtgcagtatctcagatgcagtctgtgattgaacttggaagagtgatcagagaccgaaaaactattcccataaagtatcctttgaaagaaattgtggttatccatcaagatccagaagctcttaaagatatcaagtctttggagaagtatatcattgaggaactcaatgttcgaaaagttacactgtctacagataaaaacaagtatggcattcggctaagggcagaaccagatcacatggtcctggggaagcgtctgaagggagcctttaaggcagtgatgacgtccatcaagcagttgagcagtgaggagctggagcagttccagaagactgggaccattgttgtggaaggccatgaattgcacgatgaagacatccgcctcatgtacacctttgatcaggccacaggtgggactgcgcaatttgaagcacactcagatgctcaggctttggtcctcttagatgtcactcctgaccagtcaatggtagatgaaggaatggctcgggaagtcatcaatcgcatacagaaacttcgcaaaaagtgcaatctggttccaactgatgaaatcacagtgtactataaagcaaagtctgaaggaacatatctgaatagtgttattgaaagccacacagagttcatatttaccaccataaaggctcccttgaaaccatatccagtttctccatcggataaagtccttattcaagaaaaaacacagttgaagggatctgaactggaaattacactcaccagaggatcttcccttcctggtcctgcttgtgcatatgtcaatcttaacatttgtgcaaatggcagtgaacaaggtggagtattgctcctggaaaatccaaaaggtgacaataggttggaccttttaaagctgaagagtgttgtcactagcatttttggtgtgaaaaatacagagctggctgtcttccatgatgaaacagaaatacaaaaccaaactgacttactgagtcttagtggaaaaacactttgtgtgactgcaggatcggctccctctctgatcaacagttctagtactcttctttgtcagtatatcaacctacagctcctgaatgcaaagccacaagagtgtttaatggggacagtgggcactctcctgcttgaaaacccacttgggcagaatggactcacccaccaaggtcttctgtatgaagcagccaaggtgtttggccttcggagcaggaagctaaagctgtttctgaatgagacccaaacgcaggaaattacagaagacatccccgtgaagactttgaatatgaagactgtgtatgtttctgtgttaccaacaacagcagacttctagcatgtacttatcaatgttgttcggtcagcccttccctaattacacctatcccctacacatacatgcacatagacacacacatgaacacactgaagatatttccttcaggtgtgtgtaaaatatgctgcttggattgaaattcaaatgggattgattagtcaagtaacttgagacctcacagtaatcttcacacttaaccttagacacctatgcagtcatgttgggagcaggttacaatgttacttcagcccacagtttatttctatacttgagttcttaagtacagaagatagaagtgatttaaatggcatagtatatatatcattttctggccttttaaaatttatttgagacctcttgatgaaatggacatattatatatttctgccacctggattttcctggataatttgatggaatattttaagtttcagtaaatcagaacaataaacaaactcagatat

SEQ ID NO: 6938 - DNA, 3687 bp, Homo sapiens; identical to SEQ ID NO: 6609
  misc_feature (1)..(3687): n=a,t,g or c

SEQ ID NO: 6939 - DNA, 2591 bp, Homo sapiens
  misc_feature (1)..(2591): n=a,t,g or c
gcacgagggaaaaagaaaaacagttacaggaattaaaactcaaggtttctgatttgtcagacacgagatgcaagttagaggttgaacttgcgttgaaggaagcagaaactgatgaaataaaaattttgctggaagaaagcagagcccagcagaaggagaccttgaaatctcttcttgaacaagagacagaaaatttgagaacagaaattagtaaactcaaccaaaagattcaggataataatgaaaattatcaggtgggcttagcagagctaagaactttaatgacaattgaaaaagatcagtgtatttccgagttaattagtagacatgaagaagaatctaatatacttaaagctgaattaaacaaagtaacatctttgcataaccaagcatttgaaatagaaaaaaacctaaaagaacaaataattgaactgcagagtaaattggattcagaattgagtgctcttgaaagacaaaaagatgaaaaaattacccaacaagaagagaaatacgaagctattatccagaaccttgagaaagacagacaaaaattggtcagcagccaggagcaagacagagaacagttaattcagaagcttaattgtgaaaaagatgaagctattcagactgccctaaaagaatttaaattggagagagaagttgttgagaaagagttattagaaaaagttaaacatcttgagaatcaaatagcaaaaagtcctgccattgactctaccagaggagattcttcaagcttagttgctgaacttcaagaaaagcttcaggaagaaaaagctaagtttctagaacaacttgaagagcaagaaaaaagaaagaatgaagaaatgcaaaatgttcgaacatctttgattgcggaacaacagaccaattttaacactgttttaacaagagagaaaatgagaaaagaaaacataataaatgatcttagtgataagttgaaaagtacaatgcagcaacaagaacgggataaagatttgatagagtcactttctgaagatcgagctcgtttgcttgaggaaaagaaaaagcttgaagaagaagtcagtaagttgcgtagtagcagttttgttccttcaccatatgtagctacagccccagaactttatggagcttgtgcacctgaactcccaggtgaatcagatagatccgctgtggaaacagcagatgaaggaagagtggattcagcaatggagacaagcatgatgtctgtacaagaaaatattcatatgttgtctgaagaaaaacagcggataatgctgttagaacgaacattgcaattgaaagaagaagaaaataaacggttaaatcaaagactgatgtctcagagcatgtcttcagtatcttcaaggcattctgaaaagatagctattagagattttcaggtgggagatttggtactcatcatcctagacgaacgccatgacaattatgtgttatttactgttagtctactttatattttctacattcagagtctctacctgccctggatctcaaaccaggtgagggtgcttcaggtgcatctagaagaccctgggtacttggaaaagtaatggaaaaagaatactgtcaagccaaaaaggcacaaaacagatttaaagttcctttggggacaaagttttacagagtgaaagccgtatcatggaataagaaagtataacttatggacaaaattaatacattctatgacatttttttctgatttgtcctgcagtgctcattcatcactccaaaaacagcaggccatctttttatgcaaaagtcagcgtgacaatatacttcactggtgtacatcgtttactttttaactggcttcattttaggaataataaattcatcagaatccttggctgaattaaaatggtttttgttttttggttttttttttttacccagacaactctagaaatgcggaccaaactacttcattttctcaaagggcataccttgtgcattgtggcttatgatgagccatattaattgcctgttaaatatacactagcttgaacttagatgttaaaatgttattattaccagcatttgtccttttgtgaaatcagtatcagaatacttgcactctttaacacattctttataaaatgtataaattattcagaactatttaaaataaagaggagtgttattgcatgctgataatcattttgagtttgcctcagtagatactaaagcaaattgtttcagtttttttaaatgccctttgatgtttcaaaaaaaaaaaggaactgtaatttgattgactgattttagctagccataagtaactagcaatcttcaaaagcactttcagatggattggtcatctgggttctaaagggaagagtctgtgctactaaccatttcaaatgcagactcaaaccttcccaacatctttatgactctagaataatcatattgatgaaatcgtaattcatggttgagtttcagaacaaaagatattcattgcacattaaccatttagaggtcatttaaataacaaatattgtattgtaaaagaactgtacaattttaaaacaataaagatttaacctgtaaaaaaaaaaaaaaaaaaa

SEQ ID NO: 6940 - DNA, 468 bp, Homo sapiens
  misc_feature (1)..(468): n=a,t,g or c
atggtncayytnacnccngtggagaagtcygcygtnacngcnctntggggyaaggtnaaygtggatgaagyyggyggygaggccctgggcagnctgctngtggtctacccttggacccagaggttcttngantcnttyggggatctgnnnacnccngangcagttatgggcaaccctaaggtgaaggctcatggcaagaaagtgctcggtgcctttagtgatggcctggctcacctggacaacctcaagggcacctttgccacactgagtgagctgcactgtgacaagctncaygtggatcctgagaacttcaggctnctnggcaacgtgytngtctgygtgctggcccatcactttggcaaagaattcaccccaccagtgcangcngcctatcagaaagtggtngctggtgtngctaatgccctggcccacaagtatcactaagctngcyttyttgytgtccaattt

SEQ ID NO: 6941 - DNA, 3610 bp, Homo sapiens; identical to SEQ ID NO: 721
  misc_feature (1)..(3610): n=a,t,g or c

SEQ ID NO: 6942 - DNA, 1389 bp, Homo sapiens
  misc_feature (1)..(1389): n=a,t,g or c
ctgggtgcagctctcttttcaggagagaaagctctcttggaggagctggaaaggtgcccgactccagccatgctggcgctactgtgttcctgcctgctcctggcagccggtgcctcggacgcctggacgggcgaggactcggcggagcccaactctgactcggcggagtggatccgagacatgtacgccaaggtcacggagatctggcaggaggtcatgcagcggcgggacgacgacggcacgctccacgccgcctgccaggtgcagccgtcggccacgctggacgccgcgcagccccgggtgaccggcgtcgtcctcttccggcagcttgcgccccgcgccaagctcgacgccttcttcgccctggagggcttcccgaccgagccgaacagctccagccgcgccatccacgtgcaccagttcggggacctgagccagggctgcgagtccaccgggccccactacaacccgctggccgtgccgcacccgcagcacccgggcgacttcggcaacttcgcggtccgcgacggcagcctctggaggtaccgcgccggcctggccgcctcgctcgcgggcccgcactccatcgtgggccgggccgtggtcgtccacgctggcgaggacgacctgggccgcggcggcaaccaggccagcgtggagaacgggaacgcgggccggcggctggcctgctgcgtggtgggcgtgtgcgggcccgggctctgggagcgccaggcgcgggagcactcagagcgcaagaagcggcggcgcgagagcgagtgcaaggccgcctgagcgcggcccccacccggcggcggccagggacccccgaggcccccctctgcctttgagcttctcctctgctccaacagacaccttccactctgaggtctcaccttcgcctctgctgaagtctccccgcagccctctccacccagaggtctccctataccgagacccaccatccttccatcctgaggaccgccccaaccctcggagccccccactcagtaggtctgaaggcctccatttgtaccgaaacaccccgctcacgctgacagcctcctaggctccctgaggtacctttccacccagaccctccttccccaccccataagccctgagactcccgcctttgacctgacgatcttcccccttcccgccttcaggttcctcctaggcgctcagaggccgctctggggggttgcctcgagtccccccacccctccccacccaccaccgctcccgcggcaagccagcccgtgcaacggaagccaggccaactgccccgcgtcttcagctgtttcgcatccaccgccaccccactgagagctgctcctttgggggaatgtttggcaacctttgtgttacagattaaaaattcagcaattc

SEQ ID NO: 6943 - DNA, 1523 bp, Homo sapiens; identical to SEQ ID NO: 825
  misc_feature (1)..(1523): n=a,t,g or c

SEQ ID NO: 6944 - DNA, 2259 bp, Homo sapiens; identical to SEQ ID NO: 431
  misc_feature (1)..(2259): n=a,t,g or c

SEQ ID NO: 6945 - DNA, 4892 bp, Homo sapiens; identical to SEQ ID NO: 690
  misc_feature (1)..(4892): n=a,t,g or c

SEQ ID NO: 6946 - DNA, 9980 bp, Homo sapiens
  misc_feature (1)..(9980): n=a,t,g or c
ggatcctgtaatatgcaacaacatggatggaactggaggtcattatgttaaatgaaataagccaggcagaaaaagacaaacattgcatgttatcacttatttgtgacagctaaaaattaaaacaattgaactcatagaggcaaagtactggatggttaccagaggcttggaagggtagtacagggcttgtggggagatggggatggctaatgcgtacaaaaaaattgaattaatgagacctatctggtagcagaacagagtgactatagtaaataataattgtacatttaaaaataactaaaagagtataactagattgtttataagacaaaagataaatgcttgaggggatggataccccatttaccatgatgtgattattacgcattgcatgcctgtatcaaagtatctcatgtaccctataaatatatatacctactacatacccacaaaaattaaaaattaaaaatgtaacacaaagaaagaaacagaaaagaatcacatttgaatagtcatgttaaaataacaagatagcaggtgcttttccttctttttttagagacagggtcttgctctgtcacccaggctacagtgcagtggcatgcagaggccaactcactgcagcctcaacctcctaggctcaagtgatcctcccacatcagcctccctaacagctgggactacaggtgcacaccaccatgcccaggtaatttctgtattttattgtagagatggggtcttgccatgttgctcaggctggtcttgaactcctggactcaagcaatctacccaccttggcctcccaaagtgctgggattacaggtgtgaaccactgtgcctggccctctaagtttctgctaaaatgtacttgtaacttttatactgactacacttaaaagtattaaacttgtaaagaaaaggccctggaggagtttgttctttacaaggtcagtcagaagctacaaggggccaggctggggccaaggtgagggcaggtacatgcaggggcagatgctgggtatggagtaggtgccaggtgctagctgggcatgaatgtgcacccgctccctgacctctgctccctgactctcagaaggaactagcactgcctggagacaggaagaagcagagtacggaaggcagactctctggccagagatctcgcagccaggagcacagtgagaacagagcctaagcctatctgtccagagcccaggctccctttccctacaactgcagcctccttattctggtctggcccagcagagtgaggaggggccacccacccagccatacctgctggtggctgctcggggtgcatgttcagaagaggaaaagatgcggttcaggtagtcattcagcagcttctcctgcacaatgcctgagccacaagtcagaagggagaaaagggccacatgatcagtgcagctcctggcccctgctggccccagagacttctggtcctaggccagccacaggtgcagcaaggcctgaggcctttgtcccttccttctcctcccaacaagaggagcctccttccttccctgccagctcttacctgtgaccctggatttctcagcatctgaggtcagcctatagctcttgcgggagaaagacatgccggcccccttggatgccatccttcatctctcatgggcagccagtggtcctgggggctgagccagacacagagcctgtctactcagggccagccaggggcccccacacctgacctcagtcctgccatggcaggaaggcttgggagcaggtgaggccaggggcatgcacactaacacatagggcaggggaatgcaggggactcccagcttcctacacagggagggtagccagggtctaggcccatgtaacagggaccacttcttgttctccagtgtccctgtgacccagcactagggactgggcagagagcaggtactagatatatttttgccgaaccataacaaaatgtctcagctctgtggaaatcagaccaaaatgtccaaagtgaggtgtccttgggtagagcccctgtatccatctcagttgtaagccatactgagtccagctcacaaccagaagcgacaatcctacacattcccccaagtgcagaccaccactggtctggtcatctctagccataagtcccacttactccccacaaggctggagcctctttcctcagccctgggttcctcccttcttttatccatggtcctgatagtttcaccattcccactcacacatgtggcctcccacctcatccaagcaccacccttgcccagccctcatggcaaactccattggtcctcctagtgcatctatccctcacatcatgttgctgctgcagctgctccagaacctgcactgagtccctggtgctggcctcactgatgtgtaggcgtgctgtccaacacagcagccgtcatccacatgaggttacttaaatttaaagttttaaaaattaacaattcgatttctcagttgccttagccacatttcaagagttcaatgaccacatgtggctaatggttactctgttggacagcacaaaggtagaacgttcccaccatcatataaagttctattagacagcgcaggtctagagtttcgctctgcagcactgccttagccagcactccctactctgcagttcagtctcttatctcaccccaaacagaccctctactcccgccacaaacccttgtgggtctgcaccacgcctgctcctcgggaaggtgattttcccgacctcgggccctcggtgggcgtccatgatcggtgccccttcactaccagagtagttgaagatctgattaaactcagtcattcatttgatgagcagaccttccagacacccggagtgggctccgggagtcagttgctgaggacccaggtgagaggcggaccttgtcccgcccgggactccctgtcacggctatcccgtccaaccccgccggggtatccggactcagaactgaacctactccgtctgggagcccaaggacggcgagggcgggcatggctcccccaagtcgcccccgcctggccccaagctccacaggacctgccagaccagctttccgctcggagtttcgcacccagatccctgcgctgcaggtgccctcgcactggactagcccggaccgcgaagggaatagccggaacccgccagctcagagccctgccgcccctcactcacccggagcctcggccgcagcgacccggctcacaacatccgcccaacctcttggctacggtgtccgttcagggccaaatcacgcgcacgcttgcgcgctgagcctccagccgcgcacgcgcactggcccgcgcccagcctccgctaggggaccccctccatggcttcccaccggttgttccaggcctcagcttcgccgaaagcctcaccacctccgacctccgcctgccctggggatgctcccagccctcgctgcggcagaacgcgacatgctaaccggaatccctaggccgcctgtctcctacccatacttagaggccccgctcagacggtccttaaaacgtctgaaaggccgttcctgccagagtccctgctacctgttacctccacccctatttagtcctagtggacagcctcgctcaccttccctgggatgacacttctggcggctgagatgagcgagcctctctggctctgccgccgggtgtgggctgacctgcctacagctggggcctgataaggcagcagcaaaagggtggaggggaggcagtgttgaagctggggcaagtaattttccccaatttacagggaaaaaccgaaattcagaaaagtttaatgtcacccaggggctggagcccagacctctggcagctctcactttcacaatgcccttgggctgactaggctgcagaggggtttcaccccaaccccagggcacctcaagtgtccccaccaaaccttcctaacacctgtccactaagctgtactaggcccttgcaactgacctatgggaccctgaggcctggcccctcatggctcctgtcaccaggtctcaggtcagggtccagcaggccctgagctgacgtgtggagccagagccacccaatcccgtagacaggtttcacaacttcccggatggggctgtggtgggtcacagtgcagcctccagccagaaggatggggtggctcccactcctgctgcttctgactcaatgcttaggggtccctggtaagtgcccccaaccctgatccccatctgccttcaggagggggttggccccattctcctattctaggatgagaaaaaagtcgggagcagaggctcagtgggcatggggcagtgaccttgccctcttgagcacagctgggaagccctaggaacacatagacattgcccacttaggcctctattagcacgtctgctctagcactgaagcagtgtcaggaccacacagatgcacgcacacagcaggcagtgacccctcctgagcctgatctacccctctaacctagcatatgcctttgtgcaggtgagagcccagatttggagtctgaatgcctagccagggcccttggctgggtaatgtgatggctctgagccttagcattctcatttgagagatgaggtggggcaagcttcatcacccactgctctcacagagcgtatgtgttagatctgagcccggtgcctgggccactaaacagaggcaccggtgataactaccaagtctgggcctgcttcccaggggaaatttttttcacaagtatctgtgcagggggctagactggcccttgaaagtgcatacagggtccatcccagaagcttgtagctttgatcccctgaatgaacaaagtgtggacatgccaatacacattactgacatgtatgcccacctgacctgcacccactcatgcctactctgcagggcagcgctcgccattgaatgacttccaagtgctccggggcacagagctacagcacctgctacatgcggtggtgcccgggccttggcaggaggatgtggcagatgctgaagagtgtgctggtcgctgtgggcccttaatggactgccggtgagtggccactgggctagataagactgggggcagggaagcctgggctgtggcgttaccctgtgccttcttctctccagggccttccactacaacgtgagcagccatggttgccaactgctgccatggactcaacactcgccccacacgaggctgcggcgttctgggcgctgtgacctcttccagaagaaaggcaagtgggggtggagaggggcagggtgggagacaggggacctcagcccaagttgatcttctgtctcttgctcccagactacgtacggacctgcatcatgaacaatggggttgggtaccggggcaccatggccacgaccgtgggtggcctgccctgccaggcttggagccacaagttcccgaatgatcacaagtgagacaaacaccttccctccgtcccggcctggggcttcccccagcacacactatagtgatgctctgggccctcaggtacacgcccactctccggaatggcctggaagagaacttctgccgtaaccctgatggcgaccccggaggtccttggtgctacacaacagaccctgctgtgcgcttccagagctgcggcatcaaatcctgccgggagggtaagcggcgccgggtcaagctgggagagtggagacaagcccacgtccatccacgaacccactggctctttgtctccagccgcgtgtgtctggtgcaatggcgaggaataccgcggcgcggtagaccgcacggagtcagggcgcgagtgccagcgctgggatcttcagcacccgcaccagcaccccttcgagccgggcaagtacgcgtaggcggtatcggcgtcctgggggccgggctagggaaggtccaggactccaggggcagggctccgtgtagggcaattgggcggggccagataagccagagtcccagggtcttgttcacgccccattaccgcccccaggttcctcgaccaaggtctggacgacaactattgccggaatcctgacggctccgagcggccatggtgctacactacggatccgcagatcgagcgagagttctgtgacctcccccgctgcggtaggcggcggggaccaggcctgggagggtacctgggaaccttggggaggggcgtggcttggccggggaggtaagaggggctgggcgtgacctgagagcataccccgtggagtaccgtacacctgggaaaggcgggtttggtcccagccccagagggatctcagctctcgctcggggcccgacctatctcggtccatctaagggtccgaggcacagccccgccaagaggccacaactgtcagctgcttccgcgggaagggtgagggctaccggggcacagccaataccaccactgcgggcgtaccttgccagcgttgggacgcgcaaatccctcatcagcaccgatttacgccagaaaaatacgcgtgcaagtgaggtggggggggggggcgggcgttgggacgtgctgctgcgggtgagacgggaggaaggtagtcacgggctcaaggctggaggctggcgggctagggctgagtggagcgcctgcttagagaccttcgggagaacttctgccggaaccccgacggctcagaggcgccctggtgcttcacactgcggcccggcatgcgcgcggccttttgctaccagatccggcgttgtacagacgacgtgcggccccagggtgaggcccaagcttgggggctacagagccgggctggaagctggaaccggaggccggggcgaggtctcggcctgatggctgcccgcacccgccacagactgctaccacggcgcaggggagcagtaccgcggcacggtcagcaagacccgcaagggtgtccagtgccagcgctggtccgctgagacgccgcacaagccgcagtgagtccctggtgctcccggccccgccagggccctaaccctggggcggcatgctttggtgtctgggaccagagcctggaaatggttgagactaccctgccacgattttgctcccgcttccgcctaggttcacgtttacctccgaaccgcatgcacaactggaggagaacttctgccggaacccagatggggatagccatgggccctggtgctacacgatggacccaaggaccccattcgactactgtgccctgcgacgctgcggtgagcactagtgacgcttcccccatgaccctgcctcagcccccacccaaaggctggctcccttaaccccagtgaactttgtctttcagctgatgaccagccgccatcaatcctggaccccccaggttaggagttgggccagttatgggtcaggccctttagcccacgacatccacacagtctgggtttcatccagcccaccccatcctacagaccaggtgcagtttgagaagtgtggcaagagggtggatcggctggatcagcggcgttccaagctgcgcgtggttgggggccatccgggcaactcaccctggacagtcagcttgcggaatcggtgaggcacaactgcctgtctcccacagagaggagctgaggttgtgtcctctgtggttatccactggggctgggaatctatccgtgccccttgagaggtcctagccaagaagatggcaggtcttacgaatctgtcccaggagtctgttacctgtcctaattccccactcctctaggcagggccagcatttctgcggggggtctctagtgaaggagcagtggatactgactgcccggcagtgcttctcctcctggtgagcctcccttgtgtttggggacccagtctcatcccaccttcccccttccccaggcaagctaacaagtgagccttggggcaatggactgagagtcacaaatgacctagcagagcttctctcccagccatatgcctctcacgggctatgaggtatggttgggcaccctgttccagaacccacagcatggagagccaagcctacagcgggtcccagtagccaagatggtgtgtgggccctcaggctcccagcttgtcctgctcaagctggagaggtatgtggacaacctgggagggtgtgaggtggggctgggccttgtggcctcagaccctgagtgcccccattcttgctaaagatctgtgaccctgaaccagcgtgtggccctgatctgcctgccccctgaatggtatgtggtgcctccagggaccaagtgtgagattgcaggctggggtgagaccaaaggtaagagcacagtgcacaggactgctggtggccaggaggccagccctggatcttcctgcaggaccctctccctctccccattcccctcactgcaggtacgggtaatgacacagtcctaaatgtggccttgctgaatgtcatctccaaccaggagtgtaacatcaagcaccgaggacgtgtgcgggagagtgagatgtgcactgagggactgttggcccctgtgggggcctgtgaggttggtggcagggcctgggcagccctggaagtatggggggctagaaatgaactattttatcatgaagcaggctagtcattgctgtggcccggggcctcatcagttctcctacctgccagggtgactacgggggcccacttgcctgctttacccacaactgctgggtcctggaaggaattataatccccaaccgagtatgcgcaaggtcccgctggccagctgtcttcacgcgtgtctctgtgtttgtggactggattcacaaggtcatgagactgggttaggcccagccttgatgccatatgccttggggaggacaaaacttcttgtcagacataaagccatgtttcctctttatgcctgtacagatgcttcttagcctttgcttccaggaaatgtgtcagtgactccttgctagggctcgggtggcttgagcccagcacaccctgggctaggtgatctgtccagcctaggggcttccccaaccaaggcaatgtccctgggactacttttgcccatgggtgccgtggaaagacagggcctcacactagtcctccagacatactcttgggaagggtggtacagagtagttgctaatggaaggggctgcagcagggaagctaggctggtacagagtcctggttgccaggacaggcagaggctaagcctctcactgttccctcccttctcacactggaggcagatgaagcccttgtggctgccacacccagaacctagggtctctgcaccccagagtgggaggtggggttggggatggtttggtacaaagtaccagcaggaaccaggctctgtgtcctaatttattatgactacatagcccacattcctctgcccatgcatccgtggagtccagagcccagaaagcctcctgctgccctgccagaccgttgagctcctcaagaggaagtgtggcacaggctgatcagctcatgcagaatggcagggcttcagctgcccaagtgtgtgcgtagccagagcacagcattcatgaagctgtctgactccacctccacctctgataatgcgtgggtgcttttgggatagagcaggagcctgtagggattagtcagcaacatttaaggttggagggtcctcctgtgctcacctgcccaccagctgccagggccttcatgctgcactcaccgaacaggcacattccgggtcttgagggcacggtaatactccatgccctgcttgaagggcacacgccggtcctcctggcccaacatcagtaacagtggtgtcttcacctgggtgtttggggaagagtggggagctgtgttgagctgggccctggattctggatggatgggcagcacacagggcaagcagggggctgcatacctgagggatgtatctgatgggcgatttgtccagcatctcagcccacacgctgaggtctggcaggcagtcactgctgaaaggaaagccagcctccaccacgcacctgcaagacaccgagctgttgcagccccaggaa

SEQ ID NO: 6947 - DNA, 147 bp, Homo sapiens
  misc_feature (1)..(147): n=a,t,g or c
cattcattcactcaggcttagagaaacctccaggagactgctaccatggcagagaagcccaagctccactactccaatacacggggcagaatggagtccatccggtggctcctggctgcagctggagtagaggtaggttctgagtta

SEQ ID NO: 6948 - DNA, 2441 bp, Homo sapiens
  misc_feature (1)..(2441): n=a,t,g or c
tggtctgtgtatataacaactataacttgttttagatcagagttgactgcaataatgaaaggagtgtccacactaaaacattacagaatacctccagtgaaggtagtcggctgcgcacgggtaaagatcgtaaccagaagaaagagaagccagacagcgtggatggtcagcaaccactcgtgaatggagtaccctaaactgcataattctgaagttatatttcctataccatttccgtaattcttattccatattagaaaactttgttaggccaaagacaaatagtaggcaagatggcacagggcatgaaatgaacacaaattatgctaagaattttttattttttggtattggccataagcaacaattttcagatttgcacaaaaagataccttaaaatttgaaacattgcttttaaaactacttagcacttcagggcagattttagttttattttctaaagtactgagcagtgatattctttgttaatttggaccattttcctgcattgggtgatcattcaccagtacattctcagtttttcttaatatatagcatttatggtaatcatattagacttctgttttcaatctcgtatagaagtcttcatgaaatgctatgtcatttcatgtcctgtgtcagtttatgttttggtccacttttccagtattttagtggaccctgaaatgtgtgtgatgtgacatttgtcattttcattagcaaaaaaagttgtatgatctgtgccttttttatatcttggcaggtaggaatattatatttggatgcagagttcagggaagataagttggaaacactaaatgttaaagatgtagcaaaccctgtcaaacattagtactttatagaagaatgcatgctttccatatttttttccttacataaacatcaggttaggcagtataaagaataggacttgtttttgtttttgttttgttgcactgaagtttgataaatagtgttattgagagagatgtgtaatttttctgtatagacaggagaagaaagaactatcttcatctgagagaggctaaaatgttttcagctaggaacaaatcttcctggtcgaaagttagtaggatatgcctgctctttggcctgatgaccaattttaacttagagcttttttttttaattttgtctgccccaagttttgtgaaatttttcatattttaatttcaagcttattttggagagataggaaggtcatttccatgtatgcataataatcctgcaaagtacaggtactttgtctaagaaacattggaagcaggttaaatgttttgtaaactttgaaatatatggtctaatgtttaagcagaattggaaaagactaagatcggttaacaaataacaacttttttttctttttttcttttgttttttgaagtgttggggtttggttttgttttttgagtcttttttttttaagtgaaatttattgaggaaaaatatgtgaaggaccttcactctaagatgttatatttttcttaaaaagtaactcctagtaggggtaccactgaatctgtacagagccgtaaaaactgaagttctgcctctgatgtattttgtgagtttgtttctttgaattttcattttacagttacttttccttgcatacaaacaagcatataaaatggcaacaaactgcacatgatttcacaaatattaaaaagtcttttaaaaagtattgccaaacattaatgttgatttctagttatttattctgggaatgtatagtatttgaaaacagaaattggtaccttgcacacatcatctgtaagctgtttggttttaaaatactgtagataattaaccaaggtagaatgaccttgtaatgtaactgctcttgggcaatattctctgtacatattagcgacaacagattggattttatgttgacatttgtttggttatagtgcaatatattttgtatgcaagcagtttcaataaagtttgatcttcctctgctaaattgatgttgatgcaatccttacaaatgattgcttttaaaattttaagctaggaaaagaaatctatagaaagtgttctgttacaaaatgtaactgttaccattggaaatttcacgtcataggaagttagcctttatctacccaactttcaagaaggttctttaataaagcgaaaactcaaccaaatggtacttttccacagtgtaccattaaaatatgcactagtctctttttacaaggctgtattcagcaagggcctaacttgcttaaagtgtaattactaacttctaaaactgtactttgattcacatgttttcaaatggagttggagttcattcatattacaatatttgtgtgctaaacgtgtatgtttttcagttcaaagtcatgatgtttttaaaatcttattaaagtttcaaaaatctgaagattgtttatctagatgtaaatttt

SEQ ID NO: 6949 - DNA, 3110 bp, Homo sapiens
  misc_feature (1)..(3110): n=a,t,g or c
agtgcactccgtgaaggcaaagagaacacgctgcaaaaggctttccaataatcctcgacatggcaaggaggagctcgttccagtcgtgtcagataatatccctgttcacttttgccgttggagtcaatatctgcttaggattcactgcacatcgaattaagagagcagaaggatgggaggaaggtcctcctacagtgctatcagactccccctggaccaacatctccggatcttgcaagggcaggtgctttgaacttcaagaggctggacctcctgattgtcgctgtgacaacttgtgtaagagctataccagttgctgccatgactttgatgagctgtgtttgaagacagcccgtgcgtgggagtgtactaaggacagatgtggggaagtcagaaatgaagaaaatgcctgtcactgctcagaggactgcttggccaggggagactgctgtaccaattaccaagtggtttgcaaaggagagtcgcattgggttgatgatgactgtgaggaaataaaggccgcagaatgccctgcagggtttgttcgccctccattaatcatcttctccgtggatggcttccgtgcatcatacatgaagaaaggcagcaaagtcatgcctaatattgaaaaactaaggtcttgtggcacacactctccctacatgaggccggtgtacccaactaaaacctttcctaacttatacactttggccactgggctatatccagaatcacatggaattgttggcaattcaatgtatgatcctgtatttgatgccacttttcatctgcgagggcgagagaaatttaatcatagatggtggggaggtcaaccgctatggattacagccaccaagcaaggggtgaaagctggaacattcttttggtctgttgtcatccctcacgagcggagaatattaaccatattgcagtggctcaccctgccagatcatgagaggccttcggtctatgccttctattctgagcaacctgatttctctggacacaaatatggccctttcggccctgagatgacaaatcctctgagggaaatcgacaaaattgtggggcaattaatggatggactgaaacaactaaaactgcatcggtgtgtcaacgtcatctttgtcggagaccatggaatggaagatgtcacatgtgatagaactgagttcttgagtaattacctaactaatgtggatgatattactttagtgcctggaactctaggaagaattcgatccaaatttagcaacaatgctaaatatgaccccaaagccattattgccaatctcacgtgtaaaaaaccagatcagcactttaagccttacttgaaacagcaccttcccaaacgtttgcactatgccaacaacagaagaattgaggatatccatttattggtggaacgcagatggcatgttgcaaggaaacctttggatgtttataagaaaccatcaggaaaatgctttttccagggagaccacggatttgataacaaggtcaacagcatgcagactgtttttgtaggttatggcccaacatttaagtacaagactaaagtgcctccatttgaaaacattgaactttacaatgttatgtgtgatctcctgggattgaagccagctcctaataatgggacccatggaagtttgaatcatctcctgcgcactaataccttcaggccaaccatgccagaggaagttaccagacccaattatccagggattatgtaccttcagtctgattttgacctgggctgcacttgtgatgataaggtagagccaaagaacaagttggatgaactcaacaaacggcttcatacaaaagggtctacagaagagagacacctcctctatgggcgacctgcagtgctttatcggactagatatgatatcttatatcacactgactttgaaagtggttatagtgaaatattcctaatgccactctggacatcatatactgtttccaaacaggctgaggtttccagcgttcctgaccatctgaccagttgcgtccggcctgatgtccgtgtttctccgagtttcagtcagaactgtttggcctacaaaaatgataagcagatgtcctacggattcctctttcctccttatctgagctcttcaccagaggctaaatatgatgcattccttgtaaccaatatggttccaatgtatcctgctttcaaacgggtctggaattatttccaaagggtattggtgaagaaatatgcttcggaaagaaatggagttaacgtgataagtggaccaatcttcgactatgactatgatggcttacatgacacagaagacaaaataaaacagtacgtggaaggcagttccattcctgttccaactcactactacagcatcatcaccagctgtctggatttcactcagcctgccgacaagtgtgacggccctctctctgtgtcctccttcatcctgcctcaccggcctgacaacgaggagagctgcaatagctcagaggacgaatcaaaatgggtagaagaactcatgaagatgcacacagctagggtgcgtgacattgaacatctcaccagcctggacttcttccgaaagaccagccgcagctacccagaaatcctgacactcaagacatacctgcatacatatgagagcgagatttaactttctgagcatctgcagtacagtcttatcaactggttgtatatttttatattgtttttgtatttattaatttgaaaccaggacattaaaaatgttagtattttaatcctgtaccaaatctgacatattatgcctgaatgactccactgtttttctctaatgcttgatttaggtagccttgtgttctgagtagagcttgtaataaatactgcagcttgagtttttagtggaagcttctaaatggtgctgcagatttgatatttgcattgaggaaatattaattttccaatgcacagttgccacatttagtcctgtactgtatggaaacactgattttgtaaagttgcctttatttgctgttaactgttaactatgacagatatatttaagccttataaaccaatcttaaacataataaatcacacattcagttttttctggtaaaaaaaaaaaaaaaaa

SEQ ID NO: 6950 - DNA, 2300 bp, Homo sapiens; identical to SEQ ID NO: 3562
  misc_feature (1)..(2300): n=a,t,g or c

SEQ ID NO: 6951 - DNA, 1629 bp, Homo sapiens
  misc_feature (1)..(1629): n=a,t,g or c
gacagccccactccaatgactttttccctcctaattacccttttaaataaaatttatgaaggttttcataaattttaaaactgatttacacactttaataaaagcatgtgatggacagggagtattaggctgcagattttctacaatgaaattgacgtgagcacatcccagattatcaagtttgggagctgccccctcccccagcctccaagagctccccgcttgctcaggattgacaaatgtgtctctttcttggcagacaacagtgagctgggacggagacaagctccagtgtgtgcagaagggtgagaaggaggggcgtggctggacccagtggatcgagggtgatgagctgcacctggtaggttcctgggctgggtcaggccgggtccccagaggccctgtcattgttgaggtccagatggaccttggaaaaaggcaccatggatgggccttggttctgttctaaagcttctcttccaagggcctggaaaagatgcctgggtgactttaaaaaccaagcaatgtattttcaaggtctaggctgacccaatcatctaatcagagggaagaggtgaggagttatatccattaagcatcagcaatgagctaagcccttttgcattctataactctattctctcagaataggaatatggctcttattttagagatgaggacctgggggctctgaaagattagattacatgtccaaattgcacatctagaaagtggcagaacaaacatttgctcccaaatgatgtatatattcaccatgccaaattgtataggccaaagccaagaaggattctctaagcttctctaagatatgatctcaatctgggtcagcgggaggtgattcgggaggggaagcgtcaaggggtcctgttggtcagctctgagccacatccattcctctcagccagctctgtctgtagggtgctgcagagcactccactatacagtttaactgtctttccaaacaattggttacttaaaccaactcttggggaaaaataacagccaatgagtatttttagagttcttgccgtaagtgtgactctgctctggccaatgaccaacatctgcttttgtttcaggagatgagagtggaaggtgtggtctgcaagcaagtattcaagaaggtgcagtgaggcccaggcagacaaccttgtcccaaggaatcagcaggatgtgtgggccaggatccccctctttgcacagcatgaggcaaaaatgtccagccacccccaggcatctgttagcagagtctgtctcttggctttgtcacttttccttttcttaaaacaaagccatgccaataaagtgatctgtgttcaaaacgtctgtttgggggaagtttcactgcccactgtgctcactttttctccagggcttctgaggccagcttctcctagtgccacccatgggcagagtggataaattcagccacatgtcctgaaattgcaccgtgtttctctccagaggcacaggcttgggtctagaatgggaggtgggagagtggcctgacattcaatcatttgtgtatcaagtagctaccatgttatgtatctaattgtggccaaagtatagtgagtgccacaaagcaggagagtaccttcctcccta

SEQ ID NO: 6952 - DNA, 1450 bp, Homo sapiens; identical to SEQ ID NO: 706
  misc_feature (1)..(1450): n=a,t,g or c

SEQ ID NO: 6953 - DNA, 4466 bp, Homo sapiens; identical to SEQ ID NO: 6399

SEQ ID NO: 6954 - DNA, 640 bp, Homo sapiens
  misc_feature (1)..(640): n=a,t,g or c
attctgagccgagcccggtgccaagcgcagctagctcagcaggcggcagcggcggcctgagcttcagggcagccagctcctcccggtctcgccttcctcgcggtcagcatgaaagccttcagtcccgtgaggtccgttaggaaaaacagcctgtcggaccacagcctgggcatctcccggagcaaaacccctgtggacgacccgatgagcctgctatacaacatgaacgactgctactccaagctcaaggagctggtgcccagcatcccccagaacaagaaggtgagcaagatggaaatcctgcagcacctcatcgactacatcttggacctgcagatcgccctggactcgcatcccactattgtcagcctgcatcaccagagacccgggcagaaccagcgctccaggacgccgctgaccaccctcaacacggatatcagcatcctgtccttgcaggcttctgaattcccttctgagttaatgtcaaatgacagcaaagcactgtgtggctgaataagcggtgttcatgatttcttttattctttgcacaacaacaacaacaacaaattcacggaatcttttaagtgctgaacttatttttcaaccatttcacaaggaggacaagttgaatggacctttt

SEQ ID NO: 6955 - DNA, 1774 bp, Homo sapiens; identical to SEQ ID NO: 1253
  misc_feature (1)..(1774): n=a,t,g or c

SEQ ID NO: 6956 - DNA, 2296 bp, Homo sapiens
  misc_feature (1)..(2296): n=a,t,g or c
atgataaatttaatcccgtttcagaccttgaaggaagtaattttgaagttattggcaacatacatcaatattctaatttattagttgatgacaccgaccgtatcagtcctgatgacatcggcaatgatattcatgagtttttacacggaggagataagtgatggctgttgaatatgaaaatggtggtcatggttacgtggaacatgcatctataggaggcgttattgtacacgtgttttatgcagacgataaggaagaggaggataaataatgttagataactttgttgaattgaaaaataagtatgccgatgaacttggaaaccgtggtagaaagtgtgatgagatgaaattcaccagcgaaaaagttaatgaattgatcggtgttgatgaagcgtttaaagttccaaacaagttaatgtcaatcatgatgaatcgtgaacaacgtgagcaaacgtttaaagcatttttggaagttgagcgtgatacatcattcgattggttccatgaatattttgaagagcacccaggcagctacggcttcctcccggaactcctgtgcagctgacgacaaagccactgagcctctgcccaaggactgccctgtctcttcttacaacgaatgggaccccttagaggaagtgatagtgggcagagcagaaaacgcctgtgttccaccgttcaccatcgaggtgaaggccaacacatatgaaaagtactggccattttaccagaagcaaggagggcattattttcccaaagatcatttgaaaaaggctgttgctgaaattgaagaaatgtgcaatattttaaaaacggaaggagtgacagtaaggaggcctgaccccattgactggtcattgaagtataaaactcctgattttgagtctacgggtttatacagtgcaatgcctcgagacatcctgatagttgtgggcaatgagattatcgaggctcccatggcatggcgttcacgcttctttgagtaccgagcgtacaggtcaattatcaaagactacttccaccgtggcgccaagtggacaacagctcctaagcccacaatggctgatgagctttataaccaggattatcccatccactctgtagaagacagacacaaattggctgctcagggaaaatttgtgacaactgagtttgagccatgctttgatgctgctgacttcattcgagctggaagagatatttttgcacagagaagccaggttacaaactacctaggcattgaatggatgcgtaggcatcttgctccagactacagagtgcatatcatctcctttaaagatcccaatcccatgcatattgatgctaccttcaacatcattggacctggtattgtgctttccaaccctgaccgaccatgtcaccagattgatcttttcaagaaagcaggatggactatcattactcctccaacaccaatcatcccagacgatcatccactctggatgtcatccaaatggctttccatgaatgtcttaatgctagatgaaaaacgtgttatggtggatgccaatgaagttccaattcaaaagatgtttgaaaagctgggtatcactaccattaaagttaacattcgtaatgccaattccctgggaggaggcttccattgctggacctgcgatgtccggcgccgaggcaccttacagtcctacttggactgaacaggcctgatggagcttgtggctggcctcagatacacctaagaagcttaggggcaaggttcattctcctgctttaaaaagtgcatgaactgtagtgctttaaacaatcatctccttaacaggggtcgtaagcctggtttgcttctattacttttctttgacataaagaaaataacttctgctaggtattactctctactcctaaagttatttactatttggcttcaagtataaaattttggtgaatgtgtaccaagaaaaaattagtcacctgagtaacttggccactaataattaaccatctacctctgtttttaattttctttccaaaaggcagcttgaaatgttggtcctaatcttaattttttttcctcttctatagacttgagaatgtttttctctaaatgagagaaagacttagaatgtacacagatccaaaatagaatcagattatctctttttttctaaaggagagaaagacttagaacatacacagatcctaagtagaaccaggtaattgtctctttttctaataaggaatttgggtaatttttaattttttgttttttaaaaaataacctagactatgcaaaacatcaaagccggaattctttt

SEQ ID NO: 6957 - DNA, 1096 bp, Homo sapiens
  misc_feature (1)..(1096): n=a,t,g or c
gcgaagatggcagctgctgaggaggagccgaagcccaaaaagctgaaggtggaggcgcccgcaagccgtgagagaaaatattctctttggaatggggaatcctcttcttgacatctctgctgtagtggacaaagatttccttgataagtattctctgaaaccaaatgaccaaatcttggctgaagacaaacataaggaactgtttgatgaacttgtgaaaaaattcaaagtcgaatatcatgctggtggctctacccagaattcaattaaagtggctcagtggatgattcaacagccacacaaagcagcaacattttttggatgcattgggatagataaatttggggagatcctgaagagaaaagctgctgaggcccatgtggatgctcattactacgagcaggatgagcagccaacaggaacttgtgctgcatgcatcactggtgacaacaggtccctcatagctaatcttgctgctgccaattgttataaaaaggaaaaacatcttgatctggagagaaactggatgttggtagaaaaagcaagagtttgttatatagcaggcttttttcttacagtttccccagagtcagtattaaaggtggctcaccatgcttctgaaaacaacaggattttcactttgaatctatctgcaccgtttattagccagttctacaaggaatcattgatgaaagttatgccttatgttgatatactttttggaaatgagacagaagctgccacttttgctagagagcaaggctttgagactaaagacattaaagagatagccaaaaagacacaagccctgccaaagatgaactcaaagaggcagcgaatcgtgatcttcacccaagggagagatgacactataatggctacagaaagtgaagtcactgcttttgctgtcttggatcaagaccagagagaaattattgataccaatggagctggagatgcatttgttggaggttttctgtctcaactggtctctgacaagccactgactgaatgtatccgtgctggccactatgcagcaagcatcataattagacggactggctgcacctttcctgagaagccagacttccactga

SEQ ID NO: 6958 - DNA, 816 bp, Homo sapiens
  misc_feature (1)..(816): n=a,t,g or c
gatttgtaaaccccggagcgaggttctgcttacccgaggccgctgctgtgcggagacccccgggtgaagccaccgtcatcatgtctgaccaggaggcaaaaccttcaactgaggacttgggggataagaaggaaggtgaatatattaaactcaaagtcattggacaggatagcagtgagattcacttcaaagtgaaaatgacaacacatctcaagaaactcaaagaatcatactgtcaaagacagggtgttccaatgaattcactcaggtttctctttgagggtcagagaattgctgataatcatactccaaaagaactgggaatggaggaagaagatgtgattgaagtttatcaggaacaaacggggggtcattcaacagtttagatattctttttattttttttcttttccctcaatccttttttatttttaaaaatagttcttttgtaatgtggtgttcaaaacggaattgaaaactggcaccccatctctttgaaacatctggtaatttgaattctagtgctcattattcattattgtttgttttcattgtgctgatttttggtgatcaagcctcagtccccttcatattaccctctcctttttaaaaattacgtgtgcacagagaggtcacctttttcaggacattgcattttcaggcttgtggtgataaataagatcgaccaatgcaagtgttcataatgactttccaattggccctgatgttctagcatgtgattacttcactccctggactgtgactttcagtgggagatggaattttttccagaaaaactgaactgtggaaaaatga

SEQ ID NO: 6959 - DNA, 1223 bp, Homo sapiens
  misc_feature (1)..(1223): n=a,t,g or c
gaagtgacgcgaggcgtagcggaagttactgcagcggcggtgttgtgctgtggggaagggagaaggatttgtaaaccccggagcgaggttctgcttacccgaggccgctgctgtgcggagacccccgggtgaagccaccgtcatcatgtctgaccaggaggcaaaaccttcaactgaggacttgggggataagaaggaaggtgaatatattaaactcaaagtcattggacaggatagcagtgagattcacttcaaagtgaaaatgacaacacatctcaagaaactcaaagaatcatactgtcaaagacagggtgttccaatgaattcactcaggtttctctttgagggtcagagaattgctgataatcatactccaaaagaactgggaatggaggaagaagatgtgattgaagtttatcaggaacaaacggggggtcattcaacagtttagatattctttttattttttttcttttccctcaatccttttttatttttaaaaatagttcttttgtaatgtggtgttcaaaacggaattgaaaactggcaccccatctctttgaaacatctggtaatttgaattctagtgctcattattcattattgtttgttttcattgtgctgatttttggtgatcaagcctcagtccccttcatattaccctctcctttttaaaaattacgtgtgcacagagaggtcacctttttcaggacattgcattttcaggcttgtggtgataaataagatcgaccaatgcaagtgttcataatgactttccaattggccctgatgttctagcatgtgattacttcactcctgggactgtgactttcagtgggagatggaagtttttcagagaactgaactgtggaaaaatgacctttccttaacttgaagctacttttaaaatttgagggtctggaccaaaagaagaggaatatcaggttgaagtcaagatgacagataaggtgagagtaatgactaactccaaagatggcttcactgaagaaaaggcattttaagattttttaaaaatcttgtcagaagatcccagaaaagttctaattttcattagcaattaataaagctatacatgcagaaatgaatacaacagaacactgctctttttgattttatttgtactttttggcctgggatatgggttttaaatggacattgtctgtaccagcttcattaaaataaacaatatttgtaaaaatcat

SEQ ID NO: 6960 - DNA, 10452 bp, Homo sapiens
  misc_feature (1)..(10452): n=a,t,g or c
ctcggcccaacaaaatggcggcggcagcggtgtcgctttgtttccgcggctcctgcggcggtggcagtggtagcggcctttgagctgtggggaggttccagcagcagctacagtgacgactaagactccagtgcatttctatcgtaaccgggcgcgggggagcgcagatcggcgcccagcaatcacagaagccgacaaggcgttcaagcgaaaacatgaccgctgagcccatgagtgaaagcaagttgaatacattggtgcagaagcttcatgacttccttgcacactcatcagaagaatctgaagaaacaagttctcctccacgacttgcaatgaatcaaaacacagataaaatcagtggttctggaagtaactctgatatgatggaaaacagcaaggaagagggaactagctcttcagaaaaatccaagtcttcaggatcgtcacgatcaaagaggaaaccttcaattgtaacaaagtatgtagaatcagatgatgaaaaacctttggatgatgaaactgtaaatgaagatgcgtctaatgaaaattcagaaaatgatattactatgcagagcttgccaaaaggtacagtgattgtacagccagagccagtgctgaatgaagacaaagatgattttaaagggcctgaatttagaagcagaagtaaaatgaaaactgaaaatctcaaaaaacgcggagtgctgtggtgatatccttatatttgattccttgtgcacatgtgggagaaaatctccaaagaattacctagttttgcttaattcttgagcgatgtatgcaccaaagcacatagaagatacttaaagatgggcttcatgggattgtgagctgcactgcttgtggacaacaggtcaatcattttcaaaaagattccatttatagacacccttcattgcaagttcttatttgtaagaattgctttaagtattacatgagtgatgatattagccgtgactcagatggaatggatgaacaatgtaggtggtgtgcggaaggtggaaacttgatttgttgtgacttttgccataatgctttctgcaagaaatgcattctacgcaaccttggtcgaaaggagttgtccacaataatggatgaaaacaaccaatggtattgctacatttgtcacccagagcctttgttggacttggtcactgcatgtaacagcgtatttgagaatttagaacagttgttgcagcaaaataagaagaagataaaagttgacagtgaaaagagtaataaagtatatgaacatacatccagattttctccaaagaagactagttcaaattgtaatggagaagaaaagaaattagatgattcctgttctggctctgtaacctactcttattccgcactaattgtgcccaaagagatgattaagaaggcaaaaaaactgattgagaccacagccaacatgaactccagttatgttaaatttttaaagcaggcaacagataattcagaaatcagttctgctacaaaattacgtcagcttaaggcttttaagtctgtgttggctgatattaagaaggctcatcttgcattggaagaagacttaaattccgagtttcgagcgatggatgctgtaaacaaagagaaaaataccaaagagcataaagtcatagatgctaagtttgaaacaaaagcacgaaaaggagaaaaaccttgtgctttggaaaagaaggatatttcaaagtcagaagctaaactttcaagaaaacaggtagatagtgagcacatgcatcagaatgttccaacagaggaacaaagaacaaataaaagtaccggtggtgaacataagaaatctgatagaaaagaagaacctcaatatgaacctgccaacacttctgaagatttagacatggatattgtgtctgttccttcctcagttccagaagacatttttgagaatcttgagactgctatggaagttcagagttcagttgatcatcaaggggatggcagcagtggaactgaacaagaagtggagagttcatctgtaaaattaaatatttcttcaaaagacaacagaggaggtattaaatcaaaaactacagctaaagtaacaaaagaattatatgttaaactcactcctgtttccctttctaattccccaattaaaggtgctgattgtcaggaagttccacaagataaagatggctataaaagttgtggtctgaaccccaagttagagaaatgtggacttggacaggaaaacagtgataatgagcatttggttgaaaatgaagtttcattacttttagaggaatctgatcttcgaagatccccacgtgtaaagactacacccttgaggcgaccgacagaaactaaccctgtaacatctaattcagatgaagaatgtaatgaaacagttaaggagaaacaaaaactatcagttccagtgagaaaaaaggataagcgtaattcttctgacagtgctatagataatcctaagcctaataaattgccaaaatctaagcaatcagagactgtggatcaaaattcagattctgatgaaatgctagcaatcctcaaagaggtgagcaggatgagtcacagttcttcttcagatactgatattaatgaaattcatacaaaccataagactttgtatgatttaaagactcaggcggggaaagatgataaaggaaaaaggaaacgaaaaagttctacatctggctcagattttgatactaaaaagggcaaatcagctaagagctctataatttctaaaaagaaacgacaaacccagtctgagtcttctaattatgactcagaattagaaaaagagataaagagcatgagtaaaattggtgctgccagaaccaccaaaaaaagaattccaaatacaaaagattttgactcttctgaagatgagaaacacagcaaaaaaggaatggataatcaagggcacaaaaatttgaagacctcacaagaaggatcatctgatgatgctgaaagaaaacaagagagagagactttctcttcagcagaaggcacagttgataaagacacgaccatcatggaattaagagatcgacttcctaagaagcagcaagcaagtgcttccactgatggtgtcgataagctttctgggaaagagcagagttttacttctttggaagttagaaaagttgctgaaactaaagaaaagagcaagcatctcaaaaccaaaacatgtaaaaaagtacaggatggcttatctgatattgcagagaaattcctaaagaaagaccagagcgatgaaacttctgaagatgataaaaagcagagcaaaaagggaactgaagaaaaaaagaaaccttcagactttaagaaaaaagtaattaaaatggaacaacagtatgaatcttcatctgatggcactgaaaagttacctgagcgagaagaaatttgtcattttcctaagggcataaaacaaattaagaatggaacaactgatggagaaaagaaaagtaaaaaaataagagataaaacttctaaaaagaaggatgaattatctgattatgctgagaagtcaacagggaaaggagatagttgtgactcttcagaggataaaaagagtaagaatggagcatatggtagagagaagaaaaggtgcaagttgcttggaaagagttcaaggaagagacaagattgttcatcatctgatactgagaaatattccatgaaagaagatggttgtaactcttctgataagagactgaaaagaatagaattgagggaaagaagaaatttaagttcaaagagaaatactaaggaaatacaaagtggctcatcatcatctgatgctgaggaaagttctgaagataataaaaagaagaagcaaagaacttcatctaaaaagaaggcagtcattgtcaaggagaaaaagagaaactccctaagaacaagcactaaaaggaagcaagctgacattacatcctcatcttcttctgatatagaagatgatgatcagaattctataggtgagggaagcagcgatgaacagaaaattaagcctgtgactgaaaatttagtgctgtcttcacatactggattttgccaatcttcaggagatgaagccttatctaaatcagtgcctgtcacagtggatgatgatgatgacgacaatgatcctgagaatagaattgccaagaagatgcttttagaagaaattaaagccaatctttcctctgatgaggatggatcttcagatgatgagccagaagaagggaaaaaaagaactggaaaacaaaatgaagaaaacccaggagatgaggaagcaaaaaatcaagtcaattctgaatcagattcagattctgaagaatctaagaagccaagatacagacataggcttttgcggcacaaattgactgtgagtgacggagaatctggagaagaaaaaaagacaaagcctaaagagcataaagaagtcaaaggcagaaacagaagaaaggtgagcagtgaagattcagaagattctgattttcaggaatcaggagttagtgaagaagttagtgaatccgaagatgaacagcggcccagaacaaggtctgcaaagaaagcagagttggaagaaaatcagcggagctataaacagaaaaagaaaaggcgacgtattaaggttcaagaagattcatccagtgaaaacaagagtaattctgaggaagaagaggaggaaaaagaagaggaggaggaagaggaggaggaggaggaagaggaggaggaagatgaaaatgatgattccaagtctcctggaaaaggcagaaagaaaattcggaagattcttaaagatgataaactgagaacagaaacacaaaatgctcttaaggaagaggaagagagacgaaaacgtattgctgagagggagcgtgagcgagaaaaattgagagaggtgatagaaattgaagatgcttcacccaccaagtgtccaataacaaccaagttggttttagatgaagatgaagaaaccaaagaacctttagtgcaggttcatagaaatatggttatcaaattgaaaccccatcaagtagatggtgttcagtttatgtgggattgctgctgtgagtctgtgaaaaaaacaaagaaatctccaggttcaggatgcattcttgcccactgtatgggccttggtaagactttacaggtggtaagttttcttcatacagttcttttgtgtgacaaactggatttcagcacggcgttagtggtttgtcctcttaatactgctttgaattggatgaatgaatttgagaagtggcaagagggattaaaagatgatgagaagcttgaggtttctgaattagcaactgtgaaacgtcctcaggagagaagctacatgctgcagaggtggcaagaagatggtggtgttatgatcataggctatgagatgtatagaaatcttgctcaaggaaggaatgtgaagagtcggaaacttaaagaaatatttaacaaagctttggttgatccaggccctgattttgttgtttgtgatgaaggccatattctaaaaaatgaagcatctgctgtttctaaagctatgaattctatacgatcaaggaggaggattattttaacaggaacaccacttcaaaataacctaattgagtatcattgtatggttaattttatcaaggaaaatttacttggatccattaaggagttcaggaatagatttataaatccaattcaaaatggtcagtgtgcagattctaccatggtagatgtcagagtgatgaaaaaacgtgctcacattctctatgagatgttagctggatgtgttcagaggaaagattatacagcattaacaaaattcttgcctccaaaacacgaatatgtgttagctgtgagaatgacttctattcagtgcaagctctatcagtactacttagatcacttaacaggtgtgggcaataatagtgaaggtggaagaggaaaggcaggtgcaaagcttttccaagattttcagatgttaagtagaatatggactcatccttggtgtttgcagctagactacattagcaaagaaaataagggttattttgatgaagacagtatggatgaatttatagcctcagattctgatgaaacctccatgagtttaagctccgatgattatacaaaaaagaagaaaaaagggaaaaaggggaaaaaagatagtagctcaagtggaagtggcagtgacaatgatgttgaagtgattaaggtctggaattcaagatctcggggaggtggtgaaggaaatgtggatgaaacaggaaacaatccttctgtttctttaaaactggaagaaagtaaagctacttcttcttctaatccaagcagcccagctccagactggtacaaagattttgttacagatgctgatgctgaggttttagagcattctgggaaaatggtacttctctttgaaattcttcgaatggcagaggaaattggggataaagtccttgttttcagccagtccctcatatctctggacttgattgaagattttcttgaattagctagtagggagaagacagaagataaagataaaccccttatttataaaggtgaggggaagtggcttcgaaacattgactattaccgtttagatggttccactactgcacagtcaaggaagaagtgggctgaagaatttaatgatgaaactaatgtgagaggacgattatttatcatttctactaaagcaggatctctaggaattaatctggtagctgctaatcgagtaattatattcgacgcttcttggaatccatcttatgacatccagagtatattcagagtttatcgctttggacaaactaagcctgtttatgtatataggttcttagctcagggaaccatggaagataagatttatgatcggcaagtaactaagcagtcactgtcttttcgagttgttgatcagcagcaggtggagcgtcattttactatgaatgagcttactgaactttatacttttgagccagacttattagatgaccctaattcagaaaagaagaagaagagggatactcccatgctgccaaaggataccatacttgcagagctccttcagatacataaagaacacattgtaggataccatgaacatgattctcttttggaccacaaagaagaagaagagttgactgaagaagaaagaaaagcagcttgggctgagtatgaagcagagaagaagggactgaccatgcgtttcaacataccaactgggaccaatttaccccctgtcagtttcaactctcaaactccttatattcctttcaatttgggagccctgtcagcaatgagtaatcaacagctggaggacctcattaatcaaggaagagaaaaagttgtagaagcaacaaacagtgtgacagcagtgaggattcaacctcttgaggatataatttcagctgtatggaaggagaacatgaatctctcagaggcccaagtacaggcgttagcattaagtagacaagccagccaggagcttgatgttaaacgaagagaagcaatctacaatgatgtattgacaaaacaacagatgttaatcagctgtgttcagcgaatacttatgaacagaaggctccagcagcagtacaatcagcagcaacagcaacaaatgacttatcaacaagcaacactgggtcacctcatgatgccaaagcccccaaatttgatcatgaatccttctaactaccagcagattgatatgagaggaatgtatcagccagtggctggtggtatgcagccaccaccattacagcgtgcaccacccccaatgagaagcaaaaatccaggaccttcccaagggaaatcaatgtgattttgcactaaaagcttaatggattgttaaaatcatagaaagatcttttatttctttaggaatcaatgacttaacagaactcaactgtataaatagtttggtccccttaaatgccaatcttccatattagttttacttttttttttttttaaatagggcataccatttcttcctgacatttgtcagtgatgttgcctagaatcttcttacacacgctgagtacagaagatatttcaaattgttttcagtgaaaacaagtccttccataatagtaacaactccacagatttcctctctaaatttttatgcctgcttttagcaaccataaaattgtcataaaattaataaatttaggaaagaataaagatttatatattcattctttacatataaaaacacacagctgagttcttagagttgattcctcaagttatgaaatacttttgtacttaatccatttcttgattaaagtgattgaaatggttttaatgttcttttgactgaagtctgaaactgggctcctgctttattgtctctgtgactgaaagttagaaactgagggttatctttgacacagaattgtgtgcaatattcttaaatactactgctctaaaagttggagaagtcttgcagttatcttagcattgtataaacagccttaagtatagcctaagaagagaattcctttttcttctttagtccttctgccattttttattttcagttatatgtgctgaaataattactggtaaaatttcagggttgtggattatcttccacacatgaattttctctctcctggcacgaatataaagcacatctcttaactgcatggtgccagtgctaatgcttcatcctgttgctggcagtgggatgtggacttagaaaatcaagttctagcattttagtaggttaacactgaagttgtggttgttaggttcacaccctgttttataaacaacatcaaaatggcagaaccattgctgactttaggttcacatgaggaatgtacttttaacaattcccagtactatcagtattgtgaaataattcctctgaaagataagaatcactggcttctatgcgcttcttttctctcatcatcatgttcttttaccccagtttccttacatttttttaaattgtttcagagtttgttttttttttagtttagattgtgaggcaattattaaatcaaaattaattcatccaatacccctttactagaagttttactagaaaatgtattacattttattttttcttaatccagttctgcaaaaatgacctataaatttattcatgtacaattttggttacttgaattgttaaagaaaacattgtttttgactatgggagtcaactcaacatggcagaaccatttttgagatgatgatacaacaggtagtgaaacagcttaagaattccaaaaaaaaaaaaaaaaaaaaaaaaaaagaaaactgggtttgggctttgctttaggtatcactggattagaatgagtttaacattagctaaaactgctttgagttgtttggatgattaagagattgccatttttatcttggaagaactagtggtaaaacatccaagagcactaggattgtgatacagaatttgtgaggtttggtggatccacgcccctctcccccactttcccatgatgaaatatcactaataaatcctgtatatttagatattatgctagccatgtaatcagatttatttaattgggtggggcaggtgtgtatttactttagaaaaaatgaaaaagacaagatttatgagaaatatttgaaggcagtacactctggccaactgttaccagttggtatttctacaagttcagaatattttaaacctgatttactagacctgggaattttcaacatggtctaattatttactcaaagacatagatgtgaaatttaggcaaccttctaaatcttttcaccatggatgaaactataacttaaagataatacttagaagggttaattggaaatcagagtttgaaataaaacttggaccactttgtatacactcttctcacttgacattttagctatataatatgtactttgagtataacatcaagctttaacaaatatttaaagacaaaaaaatcacgtcagtaaaatactaaaaggctcatttttatatttgttttagatgttttaaatagttgcaatggattaaaaatgatgatttaaaatgttgcttgtaatacagttttgcctgctaaattctccacattttgtaacctgttttatttctttgggtgtaaagcgtttttgcttagtattgtgatattgtatatgttttgtcccagttgtatagtaatgtttcagtccatcatccagctttggctgctgaaatcatacagctgtgaagacttgcctttgtttctgttagactgcttttcagttctgtattgagtatcttaagtactgtagaaaagatgtcacttcttcctttaaggctgttttgtaatatatataaggactggaattgtgtttttaaagaaaagcattcaagtatgacaatatactatctgtgttttcaccattcaaagtgctgtttagtagttgaaacttaaactatttaatgtcatttaataaagtgaccaaaatgtg

SEQ ID NO: 6961 - DNA, 695 bp, Homo sapiens; identical to SEQ ID NO: 6611
  misc_feature (1)..(695): n=a,t,g or c

SEQ ID NO: 6962 - DNA, 248 bp, Homo sapiens
  misc_feature (1)..(248): n=a,t,g or c
atttctccctgcagtgaattttgaagattgcaccggtcgacaaaggacagcctatttttccctcgacacccgattcaaagtgggcacagatggtgtgattacagtcaaaaggcctctacggtttcataacccacagatccatttcttggtctacgcctgggactccacctacagaaagttttccaccaaagtcacgctgaatacagtggggcaccaccaccgccccccgccccatcaggtatgttggc

SEQ ID NO: 6963 - DNA, 10708 bp, Homo sapiens
  misc_feature (1)..(10708): n=a,t,g or c
gatcaccatcaccgagaccacctcacacagtactcccagctacactacctcaatcaccaccaccgagaccccctcacacagtactcccagctacactacctcaatcaccaccaccgagaccccatcacacagtactcccagcttcacttcttcaatcaccaccaccgagaccacatcccacagtactcccagcttcacttcttcaatcaggaccaccgagaccacatcctacagtactcccagcttcacttcttcaaataccatcactgagaccacctcacacagtactcccagctacattacctcaatcaccaccaccgagaccccctcaagcagtactcccagcttcagttcttcgatcaccaccactgagaccacatcccacagtactcccggcttcacttcttcaatcaccaccactgagactacatcccacagtactcccagcttcacttcttcgatcaccaccactgagaccacctcacatgatactcccagcttcacttcttcaatcaccaccagtgagaccccctcacacagtactcccagctccacttctttaatcaccaccaccaagaccacctcacacagtactcccagcttcacttcttcgatcaccaccaccgagaccacctcacacagtgctcgcagcttcacttcttcgatcaccaccaccgagaccacctcacacaatactcggagcttcacttcttcgatcaccaccaccgagaccaactctcacagtactaccagcttcacttcttcgatcaccaccaccgagaccacctcacacagtactcccagcttcagttcttcaatcaccaccactgagacccccttacacagtactcctggcctcacttcgtgggtcaccaccaccaagaccacctcacacattactcctggcctcacttcttcaatcaccaccactgagactacctcacacagtactcccggcttcacttcttcaatcaccaccactgagaccacctcagagagtactcccagcctcagttcttcaaccatctactccacagtcagcacatccacaactgccatcacctcacattttactacctcagagactgcggtgactcccacacctgtaaccccatcttctctgagtacagacatcccgaccacaagcctacgaactctcaccccttcgtctgtgggcaccagcacttcattgactacaaccacagactttccctctatacccactgatatcagtaccttaccaactcgaacacacatcatttcatcttctccctccatccaaagtacagaaacctcatcccttgtgggcaccacctctcccaccatgtccactgtgagaatgaccctcagaattactgagaacaccccaatcagttcctttagcacaagtattgttgttatacctgaaaccccaacacagacccctcctgtactgacgtcagccactgggacccaaacatctcctgcacctactactgtcacctttggaagtacggattcctccacgtccactcttcatactcttactccatcaacagccttgagcacgatcgtgtcaacatcacaggttcctattcctagcacacattcctccacccttcaaacaactccttctactccctcattgcaaacttcactcacatctacaagtgagttcactacagaatctttcactaggggaagtacgtctacaaatgcaatcttgacttcttttagtaccatcatctggtcctcaacacccactattatcatgtcctcttctccatcttctgccagcataactccagtgttctccactaccattcattctgttccttcttcaccatacattttcagtacagaaaatgtgggctccgcttctatcacaggctttcctagtctctcttcctctgcaactaccagcacttcttcaaccagctcctctctgaccacagctctcactgaaataacccccttttcttatatttcccttccctccaccacaccctgtccaggaactataacaattaccatagtccctgcctctcccactgatccatgtgttgaaatggatcccagcactgaagctacttctcctcccaccaccccattaacagtctttccctttactaccgaaatggtcacctgtcctacctccatcagtatccaaactactcttactacatatatggacacttcttccatgatgccagaaagtgagtccagcatctcacccaatgcttccagttccactggcactgggactgtacccacaaacacagttttcacaagtactcgactgcccaccagtgagacctggctgagcaacagttctgtgatccccctacctcttcctggcgtctctaccatcccgctcaccatgaaaccaagcagtagcctcccgaccatcctgaggacttcaagcaagtcaacacacccatccccacccaccactaggacttcagagacaccagtggccactacccagactcctaccacccttacatcacgcaggacaactcgcatcacttctcagatgaccacacagtccacgttgaccaccactgcaggttggaccttctgcctctctgttcccctccttcctcccctgcaaaattcctgtgtcactgaggtgaggctttatcctgagcttccctttctttctgtgttttccaggcacctgtgacaatggtggcacctgggaacagggacagtgtgcttgccttccggggttttctggggaccgctgtcagctccagaccagatgccagaatgggggtcagtgggatggcctcaaatgccagtgccccagcaccttctatggttccagttgtgagtttgctgtggaacaggtggatctaggtgagttgccagagctatgccttctgcacttcctcccacagggtgtcactgactctccccagacttatccctctgtggggcctggaggcacccatgcctttttgcccggtccttccctccctgccatctctcccatgccctccgctgccctgtgtcatgctcctctccgtcctcacccttaggaggtggctgggactaccctccctcctgggcccatctcctgacttgggctgcttggagctgtatcagtttccaactgctgccgggccaacaaacacaaatctggctgctggaacaacacgacattatcatgttagaattctgtagattaaaagtctgatgtgggtgtcactgggctgaaatcaaagcgtcaccagggctgtgttgtctttcaacggctccaggaaagaatccatttttttgccctttgcagcttctggagcctcccacagcaaggctgcatctctctgtgtctttctcccatagcctcatctccctataatgaactctggcctcctcaattgcttctcccactgttaaggacccttgtgataactttgcctcctccccaaatagtctatgttaattttctcaagatcagctgattacgccgggcggggtggctcacacctgtaatcccagcagtttgggaggctgagggggtaggatcacctgaggtcaggagttggagactagcctggccaacatggtgaaactgtctctactattagttgggcatggtggcagatgcctataatcctcactattcaggaggctgaggcaggaaaatcgcttgaatccaggaggtggatattgcagtaaagcgagatttcgccactgcacactagcgtagatgacagagggagagtgagactctgtcttaaaagaaaaaaaaaaatcagctgattgtcttataatccctgcactttggaaggccgaggagggagtatcgcttgaggcgaggagttcaggaccagcctgggcaacacagcgagaccctcatctccacaaaaaattttaaaaacttacctgggcatggtggctcatgcctgtggtcccagttatttggaaggctgaggtgggagaatcacttgagcctgggagttcaaggctgcagtgagctatgatccccctattgcacttcagcctggatgacagaatgagaccctatctcaacaataaaaaaaagttaggctgattagcaatctaattcaatctgcacccttgatcctcccttgccatgtagtatagcatagtcacagttctggggattaggacatggacatcttcccactatgggggcagccaggagggaccacaggctgaccgctatctttctgcctgctttcactcatctccacacaattccttccttcctctcgctctcttctttcttttcttcttttcttttgtctctttctcttttctttttttctttctctttttctttctttctttctctttcttttctttcctttcttttcttctttccctcatcttcacacaatgctttctccctttctttctttccttctttctttctctttctttctttctctctctctctctctctctctctttctttctttctttctttctttttctctctctctctctatctttctttttcattttgttgagagacagtctcactctgtggcccaggctggagtgcagtgatgcaatctcggctcactacaacctccgcctcctgagttcaagtgattctcctgcctcagcctcctgaggcataatgcatcctggaattcctacatctgttcctgcctctgggcatcagtcctcagggatcttggaggggagcagcaggaggagcctgtgggttggggtggtggtgttggtggcttcagacaaaagcagacagagaagtgactccggacatgcatgctctgtgtagatgtagtggagaccgaggtgggcatggaagtgtctgtggatcagcagttctcgccggacctcaatgacaacacttcccaggcctacagggatttcaacaagaccttctggaatcaggtaaagggcaaagagaggggattttttttttttttgaggtgtagtctcgcactctcaccctggctggagtgcaatggtgcgatcttgggtcactgcaacctccgcctcccgggttcacatgattctcttgcctcagcctcccaagtagctgggattacaggtgcacaccatgacacctggctaatgttttgtatttttagtagagacgggttttcactatgttggccagactggtctcgaactactgactttgtgatccacctgcctcgtcctcccaaagtgttgggattacaggcgtgagccacggcacccggccggggaggggaattgaagggtcttccctggagctggggttgggcgtctgggtcccctcaggtctgcaggttcggacgtgagcccagggatccttggtgtttcagatgcagaagatttttgcagacatgcagggcttcaccttcaagggtgtggagatcctgtccctgaggtaggagacccatctggggatgcggaggcggtgttgggtgggggaaatgtgcgcacacaaaaaacccattcctttcttttgtaatcatcagattttataaagaggggtggagggggtacataaggaatcactccctgggtattttttcggatcgttttctggggccatttatctggaggaggggtggcacctctcttcttcagcacactggaaggagagaagttgcagggacatgtgggaaggtggtgcctggattgatgactttgtccccctctggctggcccctgctctactgagtgggtcagcattagaaagagagagagagaaagagagagagggagagaacgcacgtctaggggcgcccggtggatgatggcttgatgcaacaagaagagaacgtcaggccagatgtggtggctcacacttgcnatcctagcactttgggtaggctaggcgggtggatcacctgaaagcagttcaagaccaacctgggcaacatagtgagaacccatccctacaacaataaaaatagtaataataataataataataaaatgattagccaggcatggtagtgcacacctgtagtccctgatacttgggaggctgaggagaaaggatcactttagcccaggagttggaggctgcagtgagctacaatgataccactgcactccagcctgggtgacagcaagactttgtctctataaaacacacagagagaggaagtcaatcatgtcagtcattccttgtcctgccttcccaggcagaccaagtcaggaatgctggcagccccttctgaaaaggatgcacgtggcatcccaactcatgacctctgctcccttcccccttctggtgcactttgggttgcttctggaggtgcccctccaaggacccatatgttcctggctggggcactctctaaggctgtggacccctcaggaatggcagcatcgtggtggactacctggtcctgctggagatgcccttcagcccccagctggagagcgagtatgagcaggtgaagaccacgctgaaggaggggctgcagaacgccagccaggatgtgaacagctgccaggactcccagagtgagcccaggctggagggaggggccagggcctgaggtgtcaccccagcccactccagctcagccagggggccactgggctcaggtgccagccctgtggtacctctggcaggttgggagaaggggaataagtccacacacaacggtgtcaagggtggggctagggagggtctccccgtgacctcggtactgggaaagagaccccctgattgtcatggtcagcatttcccggatggctgaagacctcggattattcaggggagatgaggcaggcaacaggagtcttcgcctgtggctctctccgtctgggagagggctctcccagacggagagagccctcactgccctccctgtgcctatcctgcctcctggcgctaaccccttgaccttaaccccttgatctgccccgcccattccatctgtgcctgtgtttccgcagccctgtgttttaagcctgactccatcaaggtgaacaacaacagcaagacagagctgaccccggcaggtaagggtggggtaaagggctgagtggtctcccgcggctatgatccgggctaccagggacatttgcccattgaagcctgtgggcagggagagacctttgggggaggcaagtcatgtggcccaggcggcccttcctggcgctggttagtggcttccacctgaggacagcaggggccacgaggagagggtgagggtgctgcgggtggcctcccctcatcgaatcccagggtctaccccacagcatcccacctcggaaatggaatcctcctcgcgcatattcagaggcaccattatcaggcccctgaatagaatggatgaggttcttgtctctgtgcatccccctccccaacccccagccatctgccgccgcgccgctcccacgggctatgaagagttctacttccccttggtggaggccacccggctccgctgtgtcaccaaatgcacgtctggggtggacaacgccatcgactgtcaccagggccagtgcgttctggagacgagcggtcccacgtgtcggtaaggccccgctcaccatcggcatcagccgagcccctcccactcattctaggatgaagccctgccccatgctccgccccggctccgcgccctgggcctacagtggagcctcgtccccagagtgccgctccaagcccatccccgttgccctacagtggagccctgccctggagctctgctcctttgatggggttgagtcctgtcccctaattctgggagagaaccccgcccactcattctagggtggggccccgcctcctcgttctagggttgaaccccgccccctccttctagggtggagccctgcccacttgatctaaggtggaatcccgccccctcacctagggtagagccccggcccctcgttctagggtggattcccagccccttgtctagggtggaaccccccgctgccctaggctggagccccgccccctcacccgcccccgcggggcccaggtgcacgggtggaccccgagcccggaggtgaagagggtctgaccctgcgatctcccgcagctgctactccaccgacacgcactggttctctggcccgcgctgcgaggtggccgtccactggagggcgctggtcgggggcctgacggccggcgccgcgctgctggtgctgctgctgctggcgctgggcgtccgggcggtgcgctccggatggtggggcggccagcgccgaggccggtgagcgtgcggggggcggggccggggggcgagggcagccaaggggtcccaggcgggccggctctgtctgaccgcgcggcggccccacctaggtcctgggaccaggacaggaaatggttcgagacctgggatgaggaagtcgtgggcactttttcaaactggggtttcgaggacgacggaacaggtgagtcctgcctcctggggaagcaggcagaggctttcctgggcaccactgcgaggacagacgccctccctgccttcctcgcatttactccgtccccctctcccttccgtcccctccctctccccttctctttctccgctcctctctctctctagacaaggatacaaatttctatgtggccttggagaacgtggacaccactatgaaggtgaggggctaaagagggggaccccaaggaactctcccagcctccattccagaatccctccccgacccccaccagggcagggagggggctgggctcggatcagcagtgacctccctgtcagcccaaaccagtggctccgcgttcccgtccctcactgtgactctgacaggtgcacatcaagagacccgagatgacctcgtcctcagtgtgagccctgcggggccccttcaccaccccctccgccctgccccggacacaagggtctgcattgcgtccatttcaagaggtggccccaggacgcgggcagcccaggctcctgctgttcttgggcaagatgagactgttcccccaaatcccatccttctccttccaacttggctgaaacccacctggagacgcagttcacgtccaggttcttccactgtggaatcttgggcaagtcagtaacgagcctcagtttcctcacctgcaaaacgggtacagcattcctgtatgatacgtcacgccgttgttgtgaaaaccacatagacttggtcaattctcggtcctactctgccctcccgtctcagccctcgtgttgccattgcctctctcggatcctccaatcctcacgtccttcacctggtctctggccctggttcttattttctctcaattccctactgcctgtttcttactttgaacctggaggcagcctgcagccccatcccatctcctgccctctcctgatctaactccctgctgcatctcttgctctcattccttagacgtcctccccttttgaccccgttccttcatccatcctgcaccccagtcccccagccctaaatcctccctcctctcctcacatcctggtccctagcaaggtatagatagcctctgtgtcttaggataccccgggtgctgttccctcggtcaccctgttgcccagttccccgtttctcttgctctcattccttgtatcctttccccttttgagcccgtccattcatcggttctgcccccgactcccccagccctaaataccccagctgctgttccccccatcaccctgctgcccaattctttattctccacccctttctctcacccctggagccctgcgggtgggggcagggcatgagttccccagtccccaaggaaaggcagccccctcagtctccctcctcctcattcccttccatctccctcccctctgccttttaaacccatcccctccgattcccctcctcccccctctctccctggtgtcacctggattcctgcagtaattctgagcccttgaaatcctcagtcgccttggcggggaagattggctttggggacaggaagtcggcacatctccaggtcttcatgtgcacaatatagagtttattgtaaaaagcagcagctctctgtcggtctccttttcaccccctcagtggtctctgtttgatcagagaacagggatttccagaggtggcactgtaggaggatcctgggagcacctgtgtctcctggggacaaaggagggggtctgtgggcagcccttgggggccatgaggttcctcacagaaaacacagaggttggggggacccattttattggggagtgactctgggcaggggccccttgggctttgtcatctatgctctccccacccccaccactgccctgaccttgatactgggggcttagggagcaattagacccctggtgttggttcagggagttgggtggtccaggggctagggctgcctggtccagccaccttttgcaaggatgggtaaagctgagcctccccaaagatcttgatcccccacaaggcccccaaaccctgatagcaaactcacacagcagagcctgtctatgctggcaccgggcccttctgttcctgctgttgtgggcagtcaggcctgcctgaggagtcgagagtgatcagaaataacgtgtccccttgggtctttgggtgctggcttgggagaggcccctttgatgctttctctgggcagggatgggccatggccttttgtcacctctgtgtctggccaggggttgggggacaaggaccattaaaagtcttaaggtggtgaagtggggcccttctgcccaaggaagaagggcttggaaacttgggggacccccaggggaaaaggcccctnggacattttggg

SEQ ID NO: 6964 - DNA, 1204 bp, Homo sapiens
  misc_feature (1)..(1204): n=a,t,g or c
ctctgaggagaagcagcagcaaacatttgctagtcagacaagtgacagggaatggattccaaacagcagtgtgtaaagctaaatgatggccacttcatgcctgtattgggatttggcacctatgcacctccagaggttccgagaagtaaagctttggaggtcacaaaattagcaatagaagctgggttccgccatatagattctgctcatttatacaataatgaggagcaggttggactggccatccgaagcaagattgcagatggcagtgtgaagagagaagacatattctacacttcaaagctttggtccacttttcatcgaccagagttggtccgaccagccttggaaaactcactgaaaaaagctcaattggactatgttgacctctatcttattcattctccaatgtctctaaagccaggtgaggaactttcaccaacagatgaaaatggaaaagtaatatttgacatagtggatctctgtaccacctgggaggccatggagaagtgtaaggatgcaggattggccaagtccattggggtgtcaaacttcaaccgcaggcagctggagatgatcctcaacaagccaggactcaagtacaagcctgtctgcaaccaggtagaatgtcatccgtatttcaaccggagtaaattgctagatttctgcaagtcgaaagatattgttctggttgcctatagtgctctgggatctcaacgagacaaacgatgggtggacccgaactccccggtgctcttggaggacccagtcctttgtgccttggcaaaaaagcacaagcgaaccccagccctgattgccctgcgctaccagctgcagcgtggggttgtggtcctggccaagagctacaatgagcagcgcatcagacagaacgtgcaggtttttgagttccagttgactgcagaggacatgaaagccatagatggcctagacagaaatctccactattttaacagtgatagttttgctagccaccctaattatccatattcagatgaatattaacatggagagctttgcctgatgtctaccagaagccctgtgtgtggatggtgacgcagaggacgtctctatgccggtgactggacatatcacctctacttaaatccgtcctgtttagcgacttcagtcaactacagctgagtccataggccagaaagacaataaatttttatcattttgaaat

SEQ ID NO: 6965 - DNA, 1922 bp, Homo sapiens; identical to SEQ ID NO: 687
  misc_feature (1)..(1922): n=a,t,g or c

SEQ ID NO: 6966 - DNA, 541 bp, Homo sapiens
  misc_feature (1)..(541): n=a,t,g or c
tagagcagtcagaaaatgaacttcttaacatctacactagcggcagcttcctagaaatcactgcactacccgctagtaacggagtcattgccattcagagtgtgcatttttttttctctttccagttttgctggcccccctaattatccattttctgatgaatattaacatggagggcattgcatgaggtctgccagaaggccctgcgtgtggatggtgacacagaggatggctctatgctggtgactggacacatcgcctctggttaaatctctcctgcttggtgatttcagcaagctacagcaaagcccattggccagaaaggaaagacaataattttgttttttcattttgaaaaaattaaatgctctctcctaaagattcttcacctactttcgtctccataacttctatgttttctttccttctgacacactagtgcccctaaattgtgatttgcctatacgtttagggccggggttggaagatgttaacaaccatttaagattcatttctgcagtgggagtgggtggagtttcag

SEQ ID NO: 6967 - DNA, 2163 bp, Homo sapiens; identical to SEQ ID NO: 6614
  misc_feature (1)..(2163): n=a,t,g or c

SEQ ID NO: 6968 - DNA, 2657 bp, Homo sapiens; identical to SEQ ID NO: 688
  misc_feature (1)..(2657): n=a,t,g or c

SEQ ID NO: 6969 - DNA, 1669 bp, Homo sapiens; identical to SEQ ID NO: 6615
  misc_feature (1)..(1669): n=a,t,g or c

SEQ ID NO: 6970 - DNA, 3231 bp, Homo sapiens; identical to SEQ ID NO: 145
  misc_feature (1)..(3231): n=a,t,g or c

SEQ ID NO: 6971 - DNA, 1869 bp, Homo sapiens
  misc_feature (1)..(1869): n=a,t,g or c
tctccacctcccctgccactccattttatccatcaaacctctccacttgcatccacaccctcccttcatccttccctcccagcaaaccttgctcatggattctgggcctctgtgggatgccaaccccacccctcggggcaccctctctgcccccaatgccacaacaccctggctgggccgggatgaggagctggccaaggtggagatcggagtcctggccactgtcctggtgctggcgaccgggggcaacctggctgtgctgctgaccctgggccagctgggccgcaagcgctcccgcatgcacctgttcgtgctgcacttagccctgacagacctggccgtggcgctcttccaggtgctgccacagctgctgtgggacatcacctaccgcttccagggccccgacctcctgtgcagggccgtcaagtacctgcaggtgctcagcatgtttgcctccacctacatgctgctggccatgacgctggaccgctacctggctgtctgtcaccccctgcgcagcctccagcagccaggccagtccacctacctgctcatcgctgctccctggctgctggccgccatcttcagcctccctcaagtcttcattttttccctgcgggaggtgatccagggctcaggggtgctggactgctgggcagacttcggcttcccttgggggccacgggcctacctcacctggaccaccctggctatcttcgttctgccggtgaccatgctcacggcctgctacagcctcatctgccacgagatctgtaaaaacctaaaagtcaagacacaggcctggcgggtgggaggagggggctggaggacttgggacaggccctcaccttccaccttagctgccaccactcgggggctgccatctcgggtcagcagcatcaacaccatctcacgggccaagatccgaacagtgaagatgacctttgtcatcgtgctggcctacatcgcttgctgggctcccttcttcagtgtccagatgtggtccgtgtgggacaagaatgcccctgatgaagattccaccaatgtggctttcaccatctctatgcttttgggcaacctcaacagctgctgcaacccctggatctacatgggcttcaacagccacctgttaccgcggcccctgcgtcaccttgcctgctgtgggggtccccagcccaggatgcgccggcggctctccgacggcagcctctcaagccgccacaccacgctgctgacccgctccagctgcccggccaccctcagcctcagcctcagcctaaccctcagtgggaggcccaggcctgaagagtcaccaagggacttggagctggcagatggggaaggcaccgctgagaccatcatcttttagaaagactcgctggggtctggtactgcccccaggactagtggaggttctctgcccacctcaggcactggaaatgagagctgggagggtaagggttggagttagaggaggccctgtctgaagcagagccaaaaggccagaatgggtcccctaccctggtgtcacagctgcccctagtgtgagggctgcctcataagctcccaatctcagacactggcagtcagggagaatcaaactgcctgtctccctggtcctgccatattcatagggtgtccathcacacatggtgtcccagatctaggcaggcctaggatggtgctgtctaggggtccacgggtggcaggaattcagaggctggccttgtgccctggctacctgtctccattctaacctgactggcacatctcagcctaaccaggagaggggagaagtgaaaaaccgtgaggaggactctatttggatcctggatttgttgttgttgttgttgttgttgttagagagaa

SEQ ID NO: 6972 - DNA, 929 bp, Homo sapiens
  misc_feature (1)..(929): n=a,t,g or c
ggttgtccagccacaaaggtgacagcatttaacaaagcttagagaaacctccaggagactgctaccatggcagagaagcccaagctccactactccaatatacggggcagaatggagtccatccggtggctcctggctgcagctggagtagagtttgaagagaaatttataaaatctgcagaagatttggacaagttaagaaatgatggatatttgatgttccagcaagtgccaatggttgagattgatgggatgaagctggtgcagaccagagccattctcaactacattgccagcaaatacaacctctatgggaaagacataaaggagaaagccctgattgatatgtatatagaaggtatagcagatttgggtgaaatgatccttcttctgccctttactcaacctgaggaacaagatgccaagcttgccttgatccaagagaaaacaaaaaatcgctacttccctgcctttgaaaaagtcttaaagagccacggacaagactaccttgttggcaacaagctgagccgggctgacattcacctggtggaacttctctactacgtggaagagcttgactctagccttatttccagcttccctctgctgaaggccctgaaaaccagaatcagtaacctgcccacagtgaagaagtttctacagcctggcagcccaaggaagcctcccatggatgagaaatctttagaagaatcaaggaagattttcaggttttaataaaccagccatagaggtcaagaacatgcaagaccagtattctaaagttttgcaacaattaagtgctttacctaagtgttgattgtgcctgttgtgaagctaatgaactctttcaaattatatgctaattaaataatacaactcctattcacccacttagttaaaattgatttcttctcattaggatctgatgt

SEQ ID NO: 6973 - DNA, 367 bp, Homo sapiens
  misc_feature (1)..(367): n=a,t,g or c
ctccagtctcacctcggcttgcaatggaccccaactgctcctgcgaggctggtggctcctgcgcctgcgccggctcctgcaagtgcaaaaagtgcaaatgcacctcctgcaagaagagctgctgctcctgttgccccctgggctgtgccaagtgtgcccagggctgcatctgcaaaggggcgtcagagaagtgcagctgctgtgcctgatgtcgggacagccctgctgtcagatgaaaacagaatgacacgtaaaatccgaggttttttttttctacaactccgactcatttgctacattcctttttttctgtgaaatatgtgaataataattaaacacttagacttgaaaaaaaaaaaaaaaaaaa

SEQ ID NO: 6974 - DNA, 567 bp, Homo sapiens; identical to SEQ ID NO: 1257
  misc_feature (1)..(567): n=a,t,g or c

SEQ ID NO: 6975 - DNA, 336 bp, Homo sapiens; identical to SEQ ID NO: 6616
  misc_feature (1)..(336): n=a,t,g or c

SEQ ID NO: 6976 - DNA, 230 bp, Homo sapiens; identical to SEQ ID NO: 895
  misc_feature (1)..(230): n=a,t,g or c

SEQ ID NO: 6977 - DNA, 400 bp, Homo sapiens
  misc_feature (1)..(400): n=a,t,g or c
accaatgtttattttttaataaagcaataattcaaaacaatttttttttctactcattcaaaaggtcataactcaggagtgctgtttataccagatgaatctacaaagccaagaacaggaatcaccgtatctccttcagtagacctgatactgtgagtcttctcttttctgttgacatatttgtgcaacatgctgtagtactggcccttcggattgaaagtatacagtgatgaaatttgctgccactctttcatgcttggagtgttatattcttttggatgcgagccctcaaagaaacatttaatattctcttttgccaattcagttgcatgctctgtggctttacttttaaggatctgctgctcctgttccaaatagattttccagaatttcagctgca

SEQ ID NO: 6978 - DNA, 156 bp, Homo sapiens; identical to SEQ ID NO: 6617
  misc_feature (1)..(156): n=a,t,g or c

SEQ ID NO: 6979 - DNA, 234 bp, Homo sapiens
  misc_feature (1)..(234): n=a,t,g or c
ctgccgagccgcagcaaatccaactgatccccacgtcttggccattcacctctgaaacttatcctgaatctggcagcatcggtcccccctctgtcatcatcgccctgctccaagcctcacatggccacgaccacatcctctccactggcctccctgcctccagtccttccctagccctcctccacagaagccccccatcacttgcaaaataaaggccaaagccttaagtctgtc

SEQ ID NO: 6980 - DNA, 437 bp, Homo sapiens
  misc_feature (1)..(437): n=a,t,g or c
tttcattaaaaaatagtgctctttattataaattactgaaatgtttcttttctgaatataaatataaatatgtgcaaagtttgacttggattgggattttgttgagttcttcaagcatctcctaatagcctcaagggcctgagtatttgggaggagagaggactggaggtggaatctttataaaagacagagtgattgaggcagattgtaaacattattaaaaaacaagaaacaaacaaaaaaatagagaaaaaaaccaccccaacacacaactgccctgtccagcccaatacctgacacagaatactttgtgtttgtttagttgcccccccccacaaaaacaaaaacaaaaacaaaaacaaaaaactgttccaggtaattccatcgctgctacattcctgtaaattgtcactgatcagtgctatggcagagcggga

SEQ ID NO: 6981 - DNA, 282 bp, Homo sapiens; identical to SEQ ID NO: 2472
  misc_feature (1)..(282): n=a,t,g or c

SEQ ID NO: 6982 - DNA, 489 bp, Homo sapiens
  misc_feature (1)..(489): n=a,t,g or c
ttcctaacactccacccacacgcaggtttatttccatcttccaggggtggaaagagctgtccccaagacactcaagaggggtgggcacaggccccaagtgagcccaggggaggacgggccggagagggccccacgcagcacctgccctgccagcctgtctgcggcccacccaccctcccattaaagtcacgttgtctcgaagcatgggtttccaggtccttgagcatagcagtggccgcacgctgggagcagcaggcggggccctggtgaggatgccttgtaaccttgcggcttggcttcaccgcagatccactctggaatgacacggttcccaccccgccaccttccccctcaaaacactgatcgggcgacgatccgctgggccggcagctggagcccagccgtggccctgcctgagccagtccagtttgtaaaataaatagcaagcgttgccggcttctgtacctcctccctgtgcctgccggcccc

SEQ ID NO: 6983 - DNA, 760 bp, Homo sapiens; identical to SEQ ID NO: 963
  misc_feature (1)..(760): n=a,t,g or c

SEQ ID NO: 6984 - DNA, 49634 bp, Homo sapiens
  misc_feature (1)..(49634): n=a,t,g or c
ctgtgtctcctgggcttctcaggaagtccctggactggtcaggcaagttcccaggtgtcccctccaggctctgagcactagagccagagctcccaccagtcagaaaggcagagcaaacacctctcaaaggtaggaggacagcgtaacatcatcacttcctcaagttctgtgatgacgggaggcagccacaggctaactgggcaggaaggtgggcctagatctcatttcccgagggggaaaaaaaagcccaaacaggatgttttaggtgaaatctcccaattttggctgggtgcggtggcttctgcctgtaatcccagcactttgggaggctgaggcaggtggatcatgaggtcaggagtttgagatcagcctggtcaatatggtgaaaccctgtctgtactaaaaatagaaaaaattagttgaccatggtggcacgcgcctgtagtcccagttctttgggaggctgaggcaggagaatcacttgtactcaggaggcagaggttgcagtgagccgagatcacgccactgcactccagcctgggagacagagcaagactccgtctcaaaaaaaagaaaagaaagaaatctcccaatttttaaatgtcagctcattcagattgaattcagatttaaaattataccactgttggccgggcatggtggctcacgcctgtaagcactttgggagcctgaggccagcagatcactgaggtcaggagtttgagaccagcctggtcaacgtggtaagaccccatctctactaaaaatacaaaaattagccaggcgtggtggcgggcgcctgtaatcccagctatttgggaggctgaggcaggagaatcacttgaacctgggaggtggaggttgcagtgagccaagattatgccactgcattccagcctgggtgacagagcaagactccgtctcacaaaacagaaatacattaattaattaaaataaaattataccactgcctcaaccagattctgcactcaggttgagcctctgtctcataacttcagctttggaaccagacagcctgggttcaaatcatcagctctgcaatttctttgctgtgtgcctttgagcacgtggcctaacatctctgtgcctcagtttcatcatctttaaaataggaataaaaatcatatctatctgagctgggctctatggcatgtgcctatagccccagctacttgggaggctgagacagcaggaccgcttgagcccaggagttcaaaaccggacaacatcgtgatatcctttttcaagaaaaaaaaaaatcacatctacctctaagggttattgtgataattcagtgggttattatttgtaatatatagcatatttaaaccttgccactgggacaggcacagtggctcacacctgtaatcccagcactttgggaagccgagatggctcacctgaatctaggagttcaagaccagcttggtcaatatcattaagactccatctctatacaatttttttgtaataaatttatattatattaaaacacatttttttaaaacccaaaaggctcataaggtaaggtgattggccttacctcctgtcacagagcaatcacgtgggacagctctggaactcagagctctgggcatcactccagccatctctgcctgttgcaccctttcaggctgcctgggcctggctctgagattggccagggcagaggacacgcacgcccttccctggcccagtcagctgcccacctagctggggcctgggagctgactcctgctgggtcctctcttgccccagagctggagatggtcaaagcccggaaccaactggatgctgtcttgcagtgtctgctggagaagagtcacatggacaggtaggccagcgtggggtcacagggccgggcaccctggtgggttgggccctctgatcctgggtggattgggtgggaccccacaggctgacttggggaggaaggtgcttaatggggaggctgctcggtgccttccttctctggggccctggaaccctgagctgagagatctcttctgcctctagggagcgtctggatgaggaagctgggaaaacaccctcagacacccacaataagtgagtttttctgattggatttggagttgagagttcgtggttggtaacttctttccttatccaagccctgaccgctcagcccagcgctacctccatcgtggcccggaccactccacctgtacaaagaccctgtggcaggagaagcttaggtccccccgtggttgccacctagacccccatgggtatgggtgggacaaaaggcccaagaggcaagtggggttcatgtgagcatctcaggtttgataccagtatccccagggtgccctctgcagggttttgcacaggcgtttgtctgagggtcaactgtctttccccacagggactgctccatcgcagccactggcaaaaggtaaggtggcagggtcccagccagctgactagaggctcccagctcctaccccagtcctgacactccctctccctacgcgggccatctgcccgcttcccccaccagcggaggaagaagaggagggagatggatgatgggctggctgagggagggccgcagcgatccagtgagtagacagtggccctagagggtcggtaaggagccaagggcctatgcaaggatgctcacacacctcccatccccaccttcccagacacatatgtgatcaagctgttcgaccggagcgtggacttggcccagttcagcgagaacacgccactgtacccaatctgccgcgcctggatgcgcaacagcccctctgtgcgcgagcgtgaatgctctcccagctcacccctgcccccgctgcctgaggatgaggaggtgggatgggtagtgggtcccagcccagcagcctggtgccagggcagtgggtggataggctcaaaggatcctgcccctaagctagtgggatagacagacacaggtccctcacgtgaatcctggatcaggctaggcacacagatgtgcactcttaggttggggtgtggatcagagtccctagggaagacatacgtaaccacctggcctgggagacagggaacagggttaccctggacagttagatgtggacctccaagatcaggggttcccaagagccgaggggctagacaagggtccttagtacagacagaagtggccaccaggccttgaggagcaggggctgggcaggaatggatgggagtctataagccatctgacccagcggggtagacaagggtccccaggacagacatataggacccttcagacatataggactgtcagaaatggacagagcttcctaggtggcacagacgtgaccccctagacaggattccctgaggcaggcagacgcgactccctgggctgacaggtgtagatggagtctctgggctggataggagaagacaggggtccctggggcaggcacacttgacccgctggctggttgaggtgtctgcccttcatacatgcctcctgtctgagtcccttagcgagcccctcatgccatttgttgctgggaaaggcaggagggatgaatgtggattcccagcccctctgctttgactctcttgggcctggcatggggcccttgtgtccccagggctcagaggtaaccaacagcaagagtcgtgatgtgtacaagctgccgccacccacacccccggggccacccggagatgcctgcagatcccgcatcccatctccactgcagcctgagatgcagggcacccctgacgatgaggtgagtatgccaggctggcccagggttatggggcacatgcggtagggctcaggaatggccactcaacctggcctgtctgtccatgcagccctctgagcccgagccctcaccctccacactcatctatcgcaacatgcagcgctggaaacgcatccgccagaggtgagcgtcccccagcctgcttgcccctcgtagggccctttgcaactgctgagtctcccctctgcctccccaggtggaaggaggcctctcatcggaaccagcttcgttactcagaaagcatgaagatcctacgagagatgtacgaacgacagtgatgttcccaggtccccccacaccagtaaacatcccccagctccacactggtgtctgctccggtccctccttcctggcccaggcacaaagcagttggcagagctctagcacatttattgggagagtaagcctgggaaagactaagggagtggtggcagggagaaaggctgtggggaatcagagcgggtgctcagttgggtcttgaaggagaagaggaggagggtgggaggtgggttgccgaggatatctggttgaagacttgggggtcaagacaaagggacttagggggatggggtctggttagagttggggagggggcctaggacatccgtgcagagtctggggaggttggggtgggagagtctgtacagtttggtgttgggtgttctagttggcctggtgtccaagagttggggcagtcgaaaaagggttccagagtctggtgtggctggctggggtttcacggcagaaaatgggctggagggggcagttgtagactgtctggttgcaggggaaggatcgggtcttgggaaccaggcctggatggtctggagtgggaggtctgtgcagtccaggacgtttggggggtggggggattgtgcctgactggcctggggttgggggagggctgtctacaccataatttggtgtcaaaatagggaagggatggaaatgtagtacccggatgtctttgtagaggactcagaaggaagtagaggaggggtcttaagtggggctatatgccaagaaagtgggtcggtggggctgagactgtcggctgagggttagggtagtgctggtagggtctggaagccggggagttgtcggtgtggggtcggaaagctggagggggtgtgagagcgagggtgtcagtggaagggtctatgttatcaaggcagtgtccaggatggaggtcagggcagaatccaggagtgggtgagaggacagtccttggcgcactcgggacatctggctgggcggagtcagatcggctttaatagagggagcctgaggaggctcccggggtgcgggcgcggcccagccccctcctacttggctgcggctggcggtggggcctgggccgacgctggtgcggcctggatggacaggacgccctcgggggacagcgcggacgtcacggcagccggatccacgccaggcggcaggcggtagcgacggtggaactcgcgcgcgacgaatccgtgctcatcctggaggggagggaggcttgagcggccccgcccctccggcccggcggcgagcgtacccgctccagccccgccccacgccgcggctcaccgggcgctcctcgtggcgcgcgtgcacctccacgtgttcgcccaccaccttgacagcaatttcctccggcgagaagtgcttcacgtctagcagcaccgaaaagtggccggggtccgtcggcacctgagcgcagcgggcgcgggcgggactgtcattgggctgggccaggctccaggacccacccagggagaccccacccccgtcggttccgtgccgcggctcactctggcctccggagttgagcagtcagctctcctactgggagtcacccaggacctcttcaccctgaacaacagggatacgccctccccctgtaatatctgggattgccctctcccccgcagtgatgaggctcccttcccctgcaaggtcaggaacctctgccctcccccggtgtcagcgaatccgaagtcatcgtgccccccagggcactgattccccagctccctcctcagagccccgggtcccttctccgccagccccgccaaactcgccaagatgcccctttccccgtctccagggtcctctgcctactctcccactcgagtcacgggacctcggcagctactggtagccttcccccacttcagagtggccgggaacccttcctcaagtcgcagggccctctcccctcctcttctggagatatcgggccaccgcacacagtctctcaactcttccccgagactaagaacattccttcccctcaggagtcactgcccgcctccttttccccagatttcccggatcaccagcctccttcagagtaagcaagactccccttagagtgacccaggccttccattctctggagagctgagagccccccaccccgccccccacctaagagcgacggggacctcccacccgctgcagtgtgcgggcctcagattcccattgactccggaagcccttcggagctgcggactctccaccccgcccaaggccaacgaacattctctcacatgttcccaccccaggctgccccagacccctggcaatggaagtggtcgagttcacccctccccaggcctggcacctgggcgacgggcagcgccacgctgggtgcgcgcaggtagtagggggcgagcgtggtggggcagagcgcagccagctcggcctccagcagcccctcgccgaagcgctggtcaaagaggcgtccgggcgccgaaagtccgggcaacggggccgaggcgcggcgcagccaagacggctgcacaggcacagggatctccatcctgctcctccgcgttgcagtgcccctgcgtgcgcagccgctcatttatagtgcgccctgtgccggcccctcggagggctgcccagggacactgggaccgtggccagacccggccattaggagagccttatttagaaacccaaacaatgacttggccatttattaagcgcctgctggatgcctggcaaatgctgtcaagaaggtgacatgaagattccccaatttccagaagaggaaactaaggctgaggagggggagccttgcgggtgtggggagcacagcgtggtgattggggcccaggacccaagaggcccacggaagagtttccagtccctttaatccactgcctcccccctggcagctctgaggatgacgcagatggaggtctttaggagcagattcctggagaatgcggtagccccgccaggatgtcaggaggacatagaacaggccctccctacccttatcctcagccagaccttgggcccagtcccccggcaggccgggcctaattctgtgcctctgactcagcctctggtgcgcagaggccagggggcgcgagcatgaacagttcaggctggccccccgggggccgcgcgctggggctggaaatagctcattttgatcccgctacctcggccaggagcccagacctggcaactgatgcaaccagctgctcctgcagcaagaaagaagttagatgaccgttgggacggactgattggcccaactgatggaggaatagcggttagagagagggcagagcgcgccccccccccaacccgccccactgcccctgcaacagaaagaatggtagttagaccggggtcgggacaggacttctgcagcaagaaggcgcttaaaaagcgggacttttaagcgagggtactttagatcacctcctaaccgcaagcccagcctcagatccttcccattggtgcacggtcttgccaattactgctacactcggcaggttctccaatcaaacacgccctgtcgggcaggcagtcgtcccagccaatcctgaaacacctccctccgggtacttctgtttcctctctttcattggtcgccttggaggccgctcgcctccggcgcgggcacagagaggggcggggctgatagggcgttgctaagcgacggagatgcgcgcggggcctgttgggtgaaggagcagagcggccggaagcgcggagggagccgcgggatggaccgcaggtgaggccgatcgctcttccagggactacaggaggctggggaggaccaacggcgagagcagcacagcctaggacgggctggatacggtctggagtcgctagggctccaccgcactggaactacaattcccaacatgctccacagccgttggcctctccagccgtagccgttagcatcccgggggtcccctaagagtcttatgttcctctctgagtgggccccaaggaattattgcctctaaaggtgtccaagaaaggcttgagatctgaatttcttcattttgaaatggcccccagacacgcctgggcgttgtctttgaactttctcgcggaggcggagcccagtggatcctggggcttgtagtccatctaccctttgccttcgtgtcccccaggaatgtatgggaaatgctcggtgatataatccagccgcggttctttctttctttctttttttttaagacagagtctctcgctctgttggcccagactggagtgcagtggcacaatcttggctactgcaacctctgcccccgggttaaagcaattctcatgcctcagcctcccaggtagctgggactacaggcacctgccaccgcgcctggctaattttttatatttttagtagagacggggtttcgccatgttagtaaggctggtctcgaacacctgacctcaagtgatccacccgcctcggtgtaatcccaaagtgctgggattacaggcgtgagccaccacgcccggcgagccgcgattcttaacctgaactccacttcgcaatcacctgggacgctgcggaaaagacacggaggcccagccccactaatagatattctgattctgttggtctggaatgggaaccgcgcgcctgtaacgttgaaaagcccctcctagactggatccagggttgagaaccaccggctgtcagttcctgagttgctccctgttaagactgctccaggggcgggctcccaggactcacccttccactgtcgatatcctgaatgtgcaacggtgcttcatggaaatgacagtccgtctcctccaggaatctatgggaattgtctggttctgccctcctctaatgtccccctccccagggctgcggcgaaaccacgtgctgcctgaaccccactttcctcttgcagcctgccagttttctccattcaagatagtccctttggagatgcgcccctgggtcgaagccactactggccatcccagagccagacctggtgtcccaaggtgaggacacccctcaaagagtgctgagtgccagcccagtagcaagagaatgacctttagagggtaggaagacatgtgatgagagatagggatgagagatttaagagacagccccttgtcccctccccacggccctgcccttgtccccctctctaccacctggattccccatctgagcccccatcacactaggttgttatcattacaggatgtgtttcctcccctctggactgagactttgtgtgtgtcctggttcccctgcagggatgacccatgagacctcacactttttcttcttgtgctcttccctgatcttagaccctgagcccatccaggtctcagagatccaggctcccacaagctcccaaggctctagccacaggtcccaactcccctgagctgtttgaggagtcctggccatccagttcagggaccccctccctgcccagcaccactgagggacagatgtgggcctccccagcacccaccctgattgacagcggggactccgtggtggccaagtaagtaccagcagccctgggggaaaaagaggctttgggttagagggagggagaaggcatgcagtaataatcatcatggccagagctgtttctgcagcactcttttaggaccaggcagtttatgtgtgttaagaactctggtgctagactgcctgagttcaaatcccagctctgtcatttaactctctgtatgatcttggcctcagtttctttatctctttttatttatttatttatttgtttagagacagggtctcgctctgttactcaggctggaggtcagtggtacaatcacagctcactataacctcaaactcctgggctcaagccgtcctcccacctcagcctcctgagttgctgggattacgatgcatgccaccacacccagcaaacctcccaccttggcctccaaaaagtgctgtgattacaggccagacgtaccatgcccagcctcagtttatttatctctaaattgggtgttttgttttgttttgtttttgtttttgtttttttgatggagtttcactcttgttgcccaagttggaatgcagtggcatgatctcggcttactgcaacctctcccttctgggttcaagtgattctcctgcctcagcctcccaagtagctgggattacaggtgcccaccaccacacctggttaattttgtgtatttttagtagagatggggtttcaccatgttggccaggctggtctcaaactcctgacctcaggtgatccacctgcctcagcctcccaaagttctgggattacaggtgtgagccactgccaggcctaaattgggcatattaatagtacacatcccctagggctgttttgagctttcagtgagttactatatataatgatctctagcagtgcttctcacatagtcaccacttagatttgtagaatacaggttcagctgctgtaacaaagagtcccaaattaattatggctgaaacaagatagaatttattcctccctcacctgcagtccaggcagaagccaccagggatgatgtggcaacccgtagttgaggtgtcagggacacaggttacttctgtcttgttgctgtccgaactctaggccgttgccctttccttcatggtgcaaaatggctttcaaccacatcagctttccaaaatcacatttcataccctgtttgtcaagaacttagtcacgtggtcacaaggctacaagggtacctggtaaatatagtccataggagactggctgtgtgcccagctaaaagttacattcctggctgggcacagtgactcattcctgtaatcccagcactttgggaagccaaagtggcaggatcccttaagcccaggagttcctgaccagcctgggcaacatggcaagaccccgtttctactaaaaatacaaaaattggcagggctgcagtggctcacgcctgtaattccagcactttgggaggccaaagtgggtggatcacctgagatcaggagtttgagaccagcctgaccaacatggtgaaactccgtctctaccaaattagccgggcgtggtggtgcatgcctgtaatcccagtgacttgggaggctgaggcagaagaatcacttgaaccaggaggcagaggttgcagtgagccaagatcacgccattgcactctaacctgggcaacaagagcaaaactccgtctcaaaaaataaactaattaattacaaataaataaataaataaaaatacaaaaagtagccgagtgtggtggcatgcacctgtgtcccagctacccaggaggctgaggagagaggatttcttgagcccaggagttgggggctgcagtgagctatgattgcaccactgccctccagcctgggtgacagagcgagaccctgtctcaaaaacagttatgtgactatataagaaagaaaagcagatattgagggatagctaccaggctctgccatggtgcttggtaaacgttggctgctataattattcttattattatttggctctcctcactccactcacctcctatcccctgatgttcacaggtatataaacaggttccgccaggctcagcccaccagtcgagaggagcgccagcctgcaggcccaaccccagctgacttttggtggctgcagtctgactctccagaccccagcagtcaaagtgcagcaggtacctctttcagtgccatccactactcccacccctaaacctttgctgatcaatgcccccagcagccactcctcctggccctcatacctcaactggggcttctcagcaggagccaacaaaccagaaggaagaccccatacagctgtccctactgcggtcaacgtgaccagtgcatcccatgctgtggctccccttcaggaaataaagcaggtgacatccccattcactccctcccttgggtgcctgaactgacaacaccagccctaggacagaattagaagatcaggagcagtggctcacacctgtaatcccagcactttgggaggccaaggtgagaggactgcttgaggccaggagttcaagaccagcttgggtgacatggtgagattctgcctctactaaaaaaaaaaaaaaaaagagagagagagagagaaccaggtgtggtggtatgtacctgtaatcccagctacttgagagcctgaggctggaggatggcttgagcctaggagttcaaggctgctgtgagctatgatcatgccactgcactccagcctgggcagtagagcaagaccctgtctctatttaaaaaaaaaaaaaaaaaaaaagcctgggcaccgtggctcatgcctataatcccagcactttggtaggctgaggcaggcagatcacgaggtcaggagttcaggaccagcctgaccaacatggtgaaaccccgtctctactaaaaatacaaaaattagccgggcgtggtggtacacacctgtaatcccagctactcaggagcctgaggcaggagaattgcttgaacccgggagacggaggttgcagtgagccaagatagcgccagcgcactccagcctggcgacagcaagactccatctcaaaaaaaaaaaaaaaagaattagagctgatccccatttcaaggaagctaaaacagaaaaggaggatttgctggctaatgtaattgagaaatccaaaagtagatgtttccagatatgcctggatccaggtgtttgaataatgttgggagagacccaactctctctgggctccatgcccccccttttttttttgatacagagtcttgctctgtcacccaggctggggtacagtggcgccatctcagctcactgcaacctccgcctctcggggtcaagcaattcttctgcctcagcctcctgagtagctgggactacaggtgcatgccaccacacccagctaatttttttgtatttttttagtagagatgggatttcaccgtgttgcccaggcttgtctcgaactcctgacctccggcaatccgcccacctcagcctcccaaagtgctaggattataggcgtgaaccaccaagcccggccttttttttttttttttgagacggagtcttgtgctgtcatccaggctggagtgcagtggcgcgatctcggctcactgcaaaccccgcctcccaggttcacgccattctcctgcctcagcctcccgagtagctgggactacaggtgcctgccaccacgcccggctaatttttttttgtatttttagtagagatggggtttcaccatgttagccaggatggtctccatctcctgaccttgtgatccacccacctcggcctcccaaagtgctaggattacaggcatgagccaccgcgcccggccttctttttttttttttttaattagatagggtcttactcttaggctggagtgcagtggcacaatcatggctcactgcagccttgaactctttgcaaccttcgcctcctgagtacctgggactacagcatgcgccaccatgcccagctaattttttggtttttttgtagagatgggatcttactttgttgtcgaggctggtctcgaagtcctgggctcaagcaatcttcctgcctcggcctcctaaagtgctgggattgcaggcgtgagccaccacgcccgcctctgtgcttctctttttttgggctcagtcccaggcgggctttcccctcacaatagccaggatggtccttggggtctctaggctcccatggtcctggctcagtgactccagtgggaagtgggggcttttcgaattgctccatcagaagccccagggctcactgtgattcactcatccttgagccaaccactgtgaaccagaggatagaatgctctgatgaagcagctctgatctgggaggtgggatccatcctcctccaaccatgatttgtccatgaaaggtgctaatccaccgggcgcggtggctcacgcctgtaatcccagcactttaggagactgaggtgggcggatcacctgaggtcgcgagtttgagaccagcctgaccaacatggagaagccctgtctctactaaaaatacaaaattagccgagcgtggtggcgcatgcctgtaatcccaggtacttgggaggctgaggcaggagaattgcttgaacccaggagatggaggttgctgtgagccgagatcgtgccattgcactccagcctgggcaacaagtgaaattcaatctcaaaaaaaaaaagaaaaaaaaaaaggtgctaatccaaaggggaaaactgggtctctcctccctgaggaggaggagcagatcctaagctggcatgtgaggttaccaagggcagtacaacctgcattccaggccctctgtttagaacccccttcccagcagcctttgggttggggctggcgtctgaccctgtcaccctgcagaacctccacacatggaactcatccctgctggacctggagacgctgagcctacagagcagagctgccaggctgctcaaacgcaggtgcccgcacccctgcccccatcacccttcctactgcggctccacgtggcccaggtctcgagacctccattgcctcactcctgccttctccctgcagcaaagcctccatctcctcctcctcctccctcagccccagcgatgccagcacttcctcattccccaccagctctgatggcctctctcccttctcggagaccttcatccctgactccagcaagggccttggccccagggcacccggtaagggctgagaggcaaagactgagggcagcctgggtgcaaatcccaactctgccactgaccagctatgggactttgggcctctctgggccttgtttctccagctgtaaaacagggataaggccagatgaggtgggtcaggcatggaggccgaggcgggcagattgcctgagctcaggagtttgagaccagcctggccaatgtggcgaaacccggtatctactaaaaatacaaaaattagccacgcgtggtacataatggtgcatagtggtgcatgcctgtagtcttagctactcagtaggctgaggcaggagaatcacttgaacctgggaggcggaggttgcagtgagccgagattgcgccattgcactccagcttgggcgacagagagagactccatctcaaaaataaataaataaatggtgccatcatagtccaattgctgggctcaagcaatcctataacctcagcctcctgagtagctgggactacaggcatgcaccactatgcccagctaattgtttttatttttttatttgttgagatgagggtctcactatgttgctcaggctgatctcaaactcctgggctcaagcgatccccccaccgccttcgcttcccaaagcactagggttataagaatgggccattcgttatgcccagctggttgttgcagttttgaatagggaagccagggaaggtgaccaagatctgatggatgtgagagaatgcaccgtgcgatacatgaaggaagagcattccaggcagagggaacgacaggtgtaaaaggcaaagccttcgccttttaccgggagagaggtgcagccaagggagggttcttaagtacgagaggcctggtctgactcaggtattcacaggctccctctggctgagagtagggaacagatttggaggagagtagagagaccagggaggctatttaagagtccaggttgggtgagtggggctggagcagggtgagggctgtagcgggtgggggagtgggtagattctggggaatatgtcttctggtcactgctgtaactccagtgtccagaacggctcaataaatatttgttgaatgaaaccaggcactgtgactcacgcctataatcccagcactttgggaggcccaggtgggatgatgatggcttgagcccaggagtttgagaccagcttgggcaacaaagcaagaccctgtctctacaaaaaaataaaaattacccccgtgtggtggcacacgccttttgtcccagctactcaggaggttaaggcaggaggatcgcctgagcccaggaggtcgagactgcagtgatcgcaccactgccctccagcctgggtgacagaacaagactatatatatataatgaacaaagacttgaatgatgacagatggagaagaccaggagtgctcgctcccctgactttgaccccttcccctcttcccaccccagagaggagctgggacagtatctggagagcctgtctgagtaaccccctgcacagttggagggcgtgtgtgcaggctgtcctggggttgctgatctccctggcccctgcctcaccctctcctctctacctccccctacagcatccccggcaccagcccaggcccagacccccacccctgctccagccccagcctcctcccaagcaccccttcggccagaggatgacattctgtaccagtggcggcagcggcggaagcttgaacaggctcagggaagcaagggtgacagagcttgggtgccgcctctgacccctgccctccgcacgttggtgagccgagggagggaggagcctggggggagctggaggaggggctgggtctgagggggactgaggaccctccaccctctctctctctgtctcagatctctcttatctgtctacagacctctcctgctccagtggagaccctcagttctctggggacccagcctaaccatgtcccactgtggagcagtgtggcccagcctggtccaccagaggccttctatgtggagaggcctccttttccctcagtgtcctctccacacatcttttgggcccccagctcccacgggttcttctgggccccacagtctgggccttgggtatcccttggggctgttcctcccacgcagcaggcctccaccctagcacatctgggctctaccctcgcgcccccggcttccctggcctccaccctcgaacccccggcctccaccccagctcccctggcctccacccttgcacccccagcctccaccccggctcccctggcctgtacccctgcacctccagcctccaccctcgcatccccagctgtcccccagggcctgcccatccctgacccaagcagctgtgcccagcctaagagcctggggcccaagtctcggaggagcagagcccctcgcccagaggctgccgagcaagtccctgcagctggccagggacctggccctcagctcaggggtgtcctgggccaggtagtggcagctcggctgttccctgacagcctggaggacacgcctcctcacttcgagggcccccctccacccaaggctggatctccgaaagtccaggccacacaaccccaaaccaaggtcactccccctccatctgaatcccagtgtcgggccaaggccgagtctctgaaagccaaggccttgccgcccgcagcggggtcagtgatacggaagagcgaagccactccttcccctggagcctgcctgcagcccgaggtcccactctctccagctgagcaggcaaccacagtcaaggcctcgccgccagccttccaggtggggtctccggaggccctggccccgcccccgcccgctgctgaccacgccccctcggaggccctgcttgcccagggccgccctgctgctgcaggctgcagaaggtgatgcccgcgccctcctggatgttggaggcaggccagccccctaagaggccggccccttggagctcattcttttctccccggcccagactccgacggcagcgagttccaggacgatcccgtgctgcaggtgctaagagcccatagggcagagctgagtcggcagaaaaggtgaccgaccctccatccccagagtctatgacactgggccccggagacctctgagacccggttaggcatccagccctcctcatcccctgtcccagcagtccgtccacagccccagattctaagcctgagcacataccccagcctctgctctcccggcctttctccagggaagcggatgcccgattatcgttcctgttggaccaggctgaagacctgggatcttggtcccctccagccgggtcgccccctaggtccccaaggaggctgctaagaagggaaggagattccctggaggccagaagactttgaattgtacagattctattttacccagtgaggctctttttttttttttcatacagttactggttatctgtgagaaaggggttgtttggaaaggccaaggggtcatgccaatttaaggaaatgccccccatcctccgctgccccatggctctgccctgccccccaccccttcctgaccacggaaacaagatctcctttctggttatatcttccttggggcagagggagtttcagacaagacttctggcaagactgggacccaccttatctggcttcactcaggagccctggctcaaatggaccaaaggactgccctccacggaggaagctactagggtcatcagagtgttggatgatggtcaggctatagcccacacatgcttgagcagcagcagcatctggtgcagctgacccctccctccttgaagcactttctctccctgcttccagcccttctctctgcacctctctggtcaggcctagtcactagcccagcatgtcaactttggcatgacccagggccatggcgttgacatctctatctgcacccacccataggtgctcttgtctagcttaatgactctaaaccccgtctctattctgataatcctcaaatttctgtctgtaacctagacctggccacgaaaccttgggctcctacctcattaccatttctacccaagggtttaaaagacatctcaaattccataggtcctaaatggagtttccaatctttccccctaggcgtgcctctccccagcttctttttttttttttttttggatggagtctagctctgtcacccaggctggagtgccatagtgtgatctcggctcactgcaagcttcgcctcccgggttcacgccattctcctgcctcagcctcccgagtagctgggactacaggtgcccgccaccacggtcggctaattttttttgtatttttagtagagacggggtttcactgtgttagccaggatggtcttggtctcctgacctcgtgatccacccgcctcggcctcccaaagtgctgggattgcaggcgtgagccaccgtgctgggccccccctccccaactttcttcggctctgtcctttgccgctcagaccaaaaaccttagagttgtctttgacttctgtctttcccttccacccacagttaaccaggaaatcctgccatctccgcctttattttattttattttttgagatggagtttcacccttgttgcccaggctgtagtacaatggcatgatctcggctcacggcaacctccacctcccgggttcaagcgattctcctgcctcagccttctgagtagctgggattacaggcacctgccaccacgcccagctaattttctttgtttgtttgtttgttttgagacagagtcttgctctgtcccccaggctggagggcagtggcacgatctcggctcactgcaacctctgccttgcaggttcaagctattcttctgcctcagcctccctagtagctgggactacaggcgtgtgccaccacgcctggctaatttttgtatttttagtagagacggggtttcaccatattggccaggctggtctcaaactcatgacctcgtgatcctcctgcctcagcctcccaaagcgctgggattacaggcatgagccatcatgcctggcaattttttgtatttttagtagagacgaggtttcaccatgttggccaggctggtctcgaactcctaacctcaggtgtcccacccacctcagcctcccaaagtgctaggattacagatgtgagccaccgcacctggcctccacctttaaaatctatccagaattcaactgcttctccccttctactgctcacacctcaatctaggctgtcatcacctcctctctggactgttggaaaacttaacggtttttataaacctgatattctttgacacacttgccatcaagaggcagagtctatgtcccttcatcttgaaactgggcccctcaacaaataaaatgcagaggaagtgatgcagcttaacttctaaagtgcagttagaaaagatgatttctcagctgggcatggtggctcacgcctgtaatcccagcactttgggaggctcaggtgggcagattacttgaggtcaggggttcaagaccagcctggccaacatggtgaaatgtctctactaaaaatacaaaaattggccaggcattggtggtgggtgcctgtaatcccagctactcaggaggctgaggcaagagaattgcttgaactcagaaggcagaggttgcagtggaaaaaaaaaaaaagataatttctctctctttctctctctctctgacacttgctttagaggctacattaaaaaaaaaaactagttgccatgctggggaggggtttgggttacacaggtgtatgcacttatgaaacttagtgaagtgtgtgaatttcattgtatgtaaagtttacctcaaaagaaaatattgaacgccagttaaagatacgcctgtaatctgacttctttgggaggccaaggcgggaggatcacttgaggccaggagtttgagactaccctgggcaacacagcaagacctgtctctacaaaaataaataagtaaataaatagccagatgtggtggcacacgatttgcagtcccattactaggggcggggaggggcgctgaggcaggaggtttacttgagcccaggagttcaaggctgtattgtagtgaactaagatcatgccactgcactccagcctgggctacagagctagaccctgtctttaaaaaaaagaaaagaaaaaaaaaagtatgtacactgaaatatttagggaacaataaaccaatgtcgacaatttattttgaaatgcatccagagatgagttggattgatggataaatagtgtaataggtagatgtgagataaagcaaatacagcaaagtgttcatggtaggatctaagtggcggatatgcgggtgtccactgtaaaatttttcaactttgctgtaatttagaaacttttcatggccgggcgcggtgactcatgcctgtaatcccagcactttgggaggccaaggcgggcggatcacgaggtcaggagatcgagaccatcctggctaacacggtgaaaccccgtctctactaaaaatacaaaaaattagccgggcgtggtggcgggcgcctgtagccccagctactcggaaggctgaggcaggagaatcacttgaacctgggaggcagagcttgcagtgagccgagattgcgccactgcactccagcctgggtgacagagcgagactccgtctcagaaaagaaacttttcataataaaatgatggagaatatatgattggggttgttttgatatctgcatttacaaaatggagggataagatggatttctagtaacttctgtatgtcacatggtaaatataatatttgttttcaacctttctttctttctttttttttttttttttttttgagatggagtcttgctctgtcacccaggctggagtgtagtggtgcaacctcggctcactgtaacctctgccttccaggttcaagtgattctccttcctcagctttccgagtagttgagattataggtgcatgccacctcacctggctaatttgtgtgtgtgtgtgtgtttttagtagagacagggtttcaccatgttggtctggctggtctcgaactcctgacctcatgatccacctgccccggcctcccaaagtgctgggattacaggtgtgaggcaccgcacccggcctgtttctaacctttctaagcaaaccatacatttaaatgaaatcagagtgggcacagtggcacaggcctgtaatctcagcactttgggaggccaaggcgagcagatcacttgaggtcacgagttagagaccagcctgggcaatatagtgaaactctgtctccactaaaaattagctgggcctggtggcgggtgcctgtagtcccaggtgctcaggaggctgaggcaggagaattgcttgaacatgggaggcggaggctgcagtgagttgagatggtgccactgcacttcagcctgggcaacagagtgagactccatctcaaaaacaaacaaactaacaaaaaaatgtaattgacaagaaaaatagctgtttagatataaggagaaataaaagatactatagtagcagaacctgatctagctgggtcacgggtggggtctagaagcattcctgaggaagttacacttaagctgagacaggtagaaattatctagttaacaaagggctgtcctaattactctagttggataaccgctcccaaaacttagtggcataaaacaattattttattatgctcatggattctgagagtcagaggtttggacagggctcatatggggacaatttttgtctcctccatgatgtctggggattcacctggaaagactcaaaggtgacttgatagacttgatggctgtggagtagaatcctccagaacttcttccgtggtcttctcccagtctgactgggactattgactaatgcctatacatagctccattggcctgggcttcctcaaagcatgtctgcttcagcatagtcacacttcgcatatgatgcaccatggttctacagctcattccagtggacgagaacattggtcaagaagctgcattgcctttcatcacatagccttagaaatcaccgtgtcacttccactgttttctattggttgaagctatcctagtcccacccagattcatagaaagcaatcatagagtccgcgtcttgataagaagagtgtcagagaatttgcagctgttttaaaatcactgcaggaccccattctccatgatgtgattattacacattgcatgcctgtatcaaaacatctcatgtgccccctcaatatatatacctaaatatacctgttatgtacccagaaaaattaaaaaataaaaaaaaaaatcactgcaggggttgatggggaaacactagacagaaggaatatcgtgtgggaaatccctgtgatgagagtgaggtcagcaaatttagtacataagtaactgcacattcacctctccctcagcactccctttcaccagcccttgcttaattattctccatagaatgaatcaccttctaatattttttttttttttcagacagagtcttgctctgtctcccaggctggagtgcagtggcaaaatctcggctgactgcaacctccgcctcctgggttcaagcaattctcctgtctcaggctcctgagtagctgggattacaggcacacgccaccacacctggctaattttaatatttgtatttttagtagagacggggtttcagcatattggccaggctggtctcgaactcctgaccttgtgatcctcccgcctcggcctcccaaagtgctggggttacaggcgtgagccactgtccccagctttttttttttttttttttttttttttttgagacagagtctcacttcaacacctaagctggagtgcagtggcgcgatctcggctcacagcaaactctgccacctgggttcaacccattgtcttgcctcagcctcccaggtagctgggattacaggcacgcccgccgccacacctggctaatttttgtatttttagtagagacggggtttctccatgctggccatgctggtgtcgaactcctgacctcaagtgatctgcccgcctcggcctcccaaagtgttgggattacaggcgtgagccaccacgcctggcctaatattctatattttgtttaatgttaattttgttcattgtcttctcccagtagcttttgagctccaatgtgggcagggtatattttctcctggtttggttgttgatgtatgtacaaattgattagagtttgagtgaatgaatgaatgaatgaatgaatgaacagaccaagaccctctgagatgagaatttgttgagggcatgactaaggagagaccctcctgtgaagggcgttattacagtgttatctgggcatgctcagtattagcaggctccattgggaatggctttatggggggcataagcatgatctggcatttccccctaagcattttcctagaaaaaaaaaatcaaggctggagattggcccgtaataagcagtagaaggggaaacaagaaaatgtccagtgggcaggggaggccaaatcgcagaaagcctcgggttacgtcctaggcaaggtatatgaggcaacgagaaacgtccatgggcggagcgtcctcggcattatgtgagcggggtcgggatcaggactgaaaaggtgagacttgggactgggactttgaaaagctgcttaaggaactgggcactgctctgaggccgtgggagaatccaattaagactatcaggggctggctggcgtggtggctcacgcctgtcatcccagcgctttgaaaggaggctgaggagggagtatctcttgagccccagagatcaagaccatcctgggtaacatagtgagacccccatgtctaaaaaaaattagccaggcgtggtagcgcacgcctgtagtcccagctacatgggaggtatcgcttgagcccaggaggttgaggctgcagtaagccacgattgcaggactgcgctccagcctgggcgacagagtgagaccctgtctcttaaagaaataaaaataaaaaagtcagaagaatggacactgggagtggacgaaaggtagggtccattgcttggtgttggaagtgtcggaagcaaagcataaagaacctgggggcttgtctcaggagggcgatgacagccaatgaaaagcagtcatgggcgtggcgctgtcaaacttcgaggggcgggaccgaggacacagagccggggcggagcccaaggtgaaaccaatgagaagcctccgggtgggcggggcatcggcctaaggccaagggcggagccaatgagaagcagcgccgcgttcccgctgccccccgcccccgtggggcgcgcgccggagccacgggcagccgttaggggcggggtctgcagccgcccgcgcgcggctcgcgccctcccctttgtgtcgccatggcggcggcagcggcgacgagaacggcgagcgaggggtcgagcgcggccggggcctgaggaggctacgcgaccatggtggtaagggtcccacgcggccgtcagcctgtccgtccggatgtcagtctgtccgtgcgcagccccgccccgcgcgccccgcccccggccccgcccgatcccgcggcctgtgcttcagccgtggtccctcccgtcctgcggccccatcccgggtcccagcccgtacctcgaccccgccccctaagcgcgcatccccgtcttccacgccctggatggggtgacagggacctagggcctgggctgggaggaggcggggctagtccaggaagggacccgcgccacccaagtggcccctgcaggggcctcctgaggctcctgggtccttccccagctcccatcccagcaccttcctcggcatccttctgccagccctcagccctccccggcggagccccctcctcctccccacagcccctttctcattcccgagccccaccccccacccgctccatccccagcctgacccttttcttctccttctccctcattttcaccctatcccagttcctctcaatcccccccgccccgcatcagtctgagcctttgcctcgtctctccagccactccttccttactccaccccaacaggccagcactgtacctcccttgatcctcgggtctgctccatctccttgtcctcatccccctcccccaccatttccctctcccaccatgctgctcccgctcattcatccattcattccctcacttagcagacattcactgagaccgcctctgtgcaggccccacgctccaggcacagagagagtcagctcccatcctgccttggggaaccttatgggctggagggggacagaccctgagggtgagaccctgagggtgactgggggttgcagggacatggagcagggagacgctacagcccagtgaatctgtctggcagctggttaatttattcatcagattttacccagtccctgctgcgcgcgactgggctggcactggggacccagaaaagaatcaggaacaatcatgtctgaacaccaactcaatgcccagctctatgctggggagctcagtctggggccctccttctgggaggccggtcatagtccaatgagagagatgaacttgtcaccaccagtgccatctcagagtgatcagagctgtgaagggagaagctctggtcaaggcatggaacctgggatgggggaacctcaggggatggagagagtccagaggagatgccaggtgcagcctgaagggtcagggagaacttcctggaggagggcacatgtgagttgggacctgaggggtgggagtgaggatgaatgtacccagggaaaggtggggcgagtgttccaggctgagggaacagcctttgcaaaggcctagaaggaaatgagaagagggtgctttttttggactcttagaagttcaagagctctgagagtgggggcaatgggaagagatgggactggagaggtaaacagaaatcagctcagggaagtctcgattatcagaccagagaattcagacttcgtcttgaagacaacagggagtcattgaaggcccaggatctatggagaaatagagccagatttgtgttttctgaaaacgatccaggctattgcggaaaagctggcaggaggggagaggctggaagcaggaaggctgatgagatgggagttgtgattgtctagacagtggtaggagatcactgtactctgcaggggctacggaagggttttcagcagggagagatgggaccagcatgctctccatcctgttgccccgcctcacgtctggcccctgcttctccagtcccccaccccagaccacacacgaagaagcagtcctgtcctcagcccagccctcacctcccccgacctgccatcctgcttcatgctcagggcggtgtgtggagcgcccggggctctggacccgcgctgccagataacaatgctctcgttgtctctttgctcccatctctgggggcctctgattctttctgctctacaggcacgcagcactgacagcctggatggcccaggggagggctcggtgcagcctctacccactgctggggggcccagtgtgaaggggaagcctgggaagaggtgagggtgagggaggaaagggctcagctaggagctggggagactcaaggagctgctggtgacgcatcccctgtctcccaggctctcagctcctcgaggccccttcccgcggctggctgactgcgcccatttccactacgagaacgttgactttggccacattcaggtatgggggctttgcatttgcacccaggagggaagacaatatcctacccaaccttgcaacgatatcaggtgctttgcttctgaaacttatccctgtgactggctgctgcacgcgtctgagcagtcagtagcaaaagttgcaggagccacagcagatggggagagctgctcattcattcatccatttgttcttttattcattcaacaacaacttttgttaggtatctgctctatgtcagggaccaggacatcaccaggccctgtcctcggggaggtccagaagggagtcacaaacccgtccctagatagtgccatccccaggaggtcaggactgggacaaaagtccacctgggccttgctttccctctgcagctcctgctgtctccagaccgtgaagggcccagcctctctggagagaatgagctggtgttcggggtgcaggtgacctgtcaggtgaggccatcccgcctctcatctagcctgagagaatggccactgtagtcctcagctcggtgtcatggggcccctgctcccttctgtccctctgctcccacagggccgttcctggccggttctccggagttacgatgactttcgttccctggatgcccacctccaccggtgcatatttgaccggaggttctcctgccttccggagcttcccccgccccccgagggtgccagggctgcccaggtaacctgcttgttgtctcagcccctgcctcatgagtgtgtcctcatccacagtgtgaaatcatcaaggcagcgggatagagaaatatttaaatactggtatggcccaagtcccaaccaatctgaatgaatggagaagccttagaaacgtagtaggcttctgctacatttagctttgctaagttttaggatcatggggagttccagggggtcccatgggagggtcaccatggtcatgccaaccagggtactcaagagcttggcccagcctgcttattcattcatatgcccatatctcagtacctaacagctgagcagcacccatgtgttcaggatgaacttcagcccagagacgagctagggcagtgtgggagggcagtgggctctctcacgtccactcacagaggcccactctgacaacctgcccccagatgctggtgccactgctgctgcagtacctggagacactgtcaggactggtggacagtaacctcaactgcgggcctgtgctcacctggatggaggtgggcctgggcagggggcttggagattccgagtgggtgagggggtgtctgaggggcgagaagcagcctcggtgtgtgtgtgggcatagaaaagaaaggagccagagtggaggaggcgttgatattttagtgtctgtgtgggcgcatgcctgtgagagaatgtgtgtgagcatgtgtgtgtgtgcacgtgtgtgtgttagcaggtgttcggctttaaggatacaagggtttaaatgtatatcagttagaaatgggttgggctgtaactcacagaacacctggctatgagtggcttaaaccagaggggttttttttcttttcttgagatggagttttactcttgttgcccaggctggagtgcagtggcatgatctcgcccaccacaacccctgcctcccaggttcaagtgattcttttgcctcagcctcctgagtagctgggattacaggcatgtgccaccacgcccggctaattttatattttcagtagagactgggtttctccatgttggtcagactggtctcaaactcctgacctcaggtgttccgcccacctcagcctcctaaagtgttgggattataggcatgagccactgtgcctggcctctggctaattaaaaaaaaatgttttgtagagacagagttttgctatgttgaccaggctggtcttgaactcctggggtcaagcaattctccaggctcaccctcccaaagtgctgggattacaggcgtgtgccaccacgcccagcacagagagattttagatggcaaccgtgtggcatctgctgtggaggatgaaggtgcagaggtggatggggaagccttcaggtggggaagcctttgggtgggagagtcctgggacatgtgaggggaaataaaggggtttttcttagaggtttccccacccgcagagggtgccagggctgcatccctacaaacaggaatctaggtgtttgaccaatagctctgagtgacaggggctcttgacgggggcgggcagtggcctcacccagcgcggaggagcttggtatgcctgcactaacaccgtcttctgacctgtccttgccacattccacctctatttcagctggacaatcacggccggcgactgctcctcagtgaggaggcgtcactcaatatccctgcagtggcggccgcccatgtgatcaaacggtatacagcccaggcgccagatgagctgtcctttgaggtgaggctgtggggaagcagattccagctgggctccccacaccccctgctccttctgacccttctcttcccacccgccctctcccaggtgggagacattgtctcggtgatcgacatgccacccacagaggatcggagctggtggcggggcaagcgaggcttccaggtgagtccagctgggcgcggacaggtggggctggggtacctgccaactggggtggcccagctactgaccctgaccttcctcaggtcgggttcttccccagtgagtgtgtggaactcttcacagagcggccaggtccgggcctgaaggcgggtaagtgccatggatggatgggaggtgtggggaggggtgggaaggggtggggcctcctgcgtcttttgcctcccactcatcccttccaccccatttttcgcctagcagatgccgatggccccccatgtggcatcccggctccccagggtatctcgtctctgacctcaggtaatagaaataggcggtcaggtcccagcccctaccccaccaggcccctggccatgctgaccccacaagacctgcctttgccctttgccccttgcccccacagctgtgccacggcctcgtgggaagctggccggcctgctccgcaccttcatgcgctcccgcccttctcggcagcggctgcggcagcggggaatcctgcgacagagggtgtttggctgcgatcttggcgagcacctcagcaactcaggccaggatggtgaggccggggcccacccaccccacccgtcacaccagggctgcggcccacccagccctgaccttgctttctcccagtgccccaggtgctgcgctgctgctccgagttcattgaggcccacggggtggtggatgggatctaccggctctcaggcgtgtcttccaacatccagaggcttcggtgagggcccttagccaaccctgtccttccacaggcactcacccagcacctccactccagccccgtgctgcatgctggggacacagttaccaggagtcaggagtggcaggatcaaggctggggtcagggacagctctcttgagagtagagttagcagtctaagcgaggactatcttcaccgagcacctgccacgtgccaggcactgttctaggcactggggacgcagcagtgagtgagacagccagaaacccctgccctcatagggcccatgggctagaggaagagacaaacaggggagggatagagttcaccagaagatgacaggtactatggaggaaaacagattggggtaaggaggatggcgacgaagagccaagagggaggcctgcagttttggatggcaagggcagagccacctcatgcgagggtctggaggaggggaggggcaggccatgcagagggagcagcagggcaaagggaacagcaacaggaggccatggccaaggagtccccgtgccagcgcaggcaaagccttcatgttagggttttggcttttactataagtgaagggggaaccgcaggagggctctgagccggggcggggtctagaggcggggaggagccaggcgagatctcggcctgcaggaggctgagaggggagtgcttgaagcctgcaggggggtggccaagagggaggcaggaggtggcaatgggtgggagattttaccacaggcagtggggccccaccagagaattgggagtagcagggtgctgggattttgtccacattttccagtgccctcttacagccaggagaatggcagctgcatggtaggagctgctcatgctctggagtcagacagtcttgggtagctgcaggcagaggcacctctgtctgagcctcagcatcctcctctgtaaatgcggcacccttctctttgccacacaggcttgctggggagttcagtaaggttctgcctctgaagagcccagtgtaggacctggggaagagggttccatccacctgcgggcacttgggggtaggggcaaggggagcatggccacgtgagcgagcccctctgacctggatcttcctcctccttgacacggtggtctcaggcacgagtttgacagtgagaggatcccggagctgtctggccctgcattcctgcaggacatccacagcgtgtcctccctctgcaagctctacttccgagagcttccgaaccctctgctcacctaccagctctatgggaagttcagtgtgagtaagggagctggcgggacggagggggccgggacgcctctggcccagacctcatcacacctgcccaccatctcaggaggccatgtcagtgcctggggaggaggagcgtctggtgcgggtgcacgatgtcatccagcagctgcccccaccacattacaggtaaaccaggaggggcagggcgggacttggtgggattccaagggggttgaggctcaggtgccccctctgctcccacccccaggaccctggagtacctgctgaggcacctggcccgcatggcgagacacagtgccaacaccagcatgcatgcccgcaacctggccattgtctgggcacccaacctgctacggtgagctgcttgctcgcctgcctgcccctcaggtctttccccaaaaccaccccaggaacccgcccagcttttcttttgtttattcatcgaatacgtgtctatcaaatacctcccatggacctggccccgtccctagcactggggacccagcactgagcatggccctgtcctcctgggactcatgttctcatggaggagatggaccatgaacatcaacaggaaaaatacagagtaaagtctgatggtgatgagtgctgaggaggagagaggaggagggaagggcagtgtgcagggtcagggcagtgtgaagtttttagcgagagtggcaagggaggctttggcaggtcttctgtggccagcagcagaataagcctggaggatttgatggtgaacgagacaggcatgatctctcccctgccggagttcacagtcttctgggggcacagatacataaacaagtaaaacaggtggtatgtcagaggacgggcgtaagatgtacggagaaaaataaacgagaaaggccaggggtacagagaagggagtgtacagttttgaataaagtgggtgaggaagactgcactaagaaggcaatatttgagtcaagacctgcagaggatgagggagggccccaggtgcgcacgtggggagtgacaggctgagggaacggcaggtgcagacatctgggcctgggccggtgcctggtgtgttggaggagctgcagggaggccggtgtggctggagctgagtgagtgaggggctgagggagaggagatgatgaggtcagagaggtgacggggaccagacagaggggtgactcacaggtcatgggtcacagtgaggactttgctcttgcctggagcgaggtgcagccagggcagggctctgagccaggcgggccctgatggaactcaggtggtctcaggctccctctggctgcaggtgggagcatactttagggtggggaccggaaggaggctctgggatgtccaggctgggggagatggaggctgggccagatggggggcagtggagggggtgacagattgattgtgggagttaaagaggggggctcagggcaaccccaaggtgtttggccagagccacaggaagaaccacactgagatggggaaggcaggaggggcgggtctgggggaaggttgagagcccagcgaggcgtgatcagtttgaggtcagaggtgttgaatagacagtcactgcctcccctggctcccctcattgccctgccagaacctgctggctgggctcaaggcacccagcctccctcccgctcctcccacccaggtccatggagctggagtcagtgggaatgggtggcgcggcggcgttccgggaagttcgggtgcagtcggtggtggtggagtttctgctcacccatgtggacgtcctgttcagcgacaccttcacctccgccggcctcgaccctgcaggtatgccctcccaccccctgaggtcctggctactgcccaccacgatcagggctgcagggggagggcaggtgggctcccagtcccgtccccaccccactgaagctgggcctccctccggctccttgaggatcccgccccggcctctccctccccgcgcccccctccttctcatttcagctcctccgctcaggattcccacctcttggcccggacgccgctcttccttcaccccttgtagctcctgggggcgcttggggccatgggtccacctgggaggaggtgggaggtccccagacttgaccccgccccggccccacccagactccccgccctgccccggaccccagcccagtcaggactcagcacgtcggagggccctctggcccgaggtaactgaagccagagccgctgccctcgctggctgccgggagctgcctcctcatcagctcgtcccgccccgccctcctcccacctgcctgctgcccgcctgctcccgcctgatccgccccggccccctgccttgccagcccgggtgggcatgctgcggggccggggcttgggctgtggcgcttggctttgcctgtggccttgggcggccccagagctgacagctgccccctttccacactccccaggccgctgcctgctccccaggcccaagtcccttgcgggcagctgcccctccacccgcctgctgacgctggaggaagcccaggcacgcacccagggccggctggggacgcccacggagcccacaactcccaaggccccggcctcacctgcggaaaggtgagtgggatgctgggggtggcgaggggcaggtggaggcctggttcctcagacggcctcctgtttctcccccaaaccgcaggaggaaaggggagagaggggagaagcagcggaagccagggggcagcagctggaagacgttctttgcactgggccggggccccagtgtccctcgaaagaagcccctgccctggctggggggcacccgtgccccaccgcagccttcaggtgagaggctgagccatgggctggtgggcagcgatggtcgctggagtgccctcctacctctccctctcctgcaggcagcagacccgacaccgtcacactgagatctgccaagagcgaggagtctctgtcatcgcaggccagcggggctggtgagcaaggcgggcaattggggggcgctacctgtgcccatgtggagccgggaggaattggggccctggtttggcctccaaattttatacttcacatttgggggccctggggcttttgaaaaatttaacctggcctttatgtacaatgagttggatacagtatcacctttggttcatcacacactgaacttaacttactcattggtccatgacgggccctttaaaagtctttattattcctgttgaacattttaaaataatatcatggacacccatgaacccagcagccagaactagagcagccccattccttctccccttcgagttcctccccactggaggcatcctctcaatttgcagactaccctgcccttgctttccaggtctgatcatacacaggtgtgtgtgtaaggatcatactgctcagttctagccattttggaaacttgatttaaagggcgttgtaagaaagggatgccgcactgtatggggagcttggctttttctccatcgctacctcacagcccgccgcgctgctgggtgctgctctccgacctctgcggggggctgcttatccaccccacccagccgtgcctctgggggctcttctgagccaccgcgccatcctcacactcctggggtactgccctcccacatacccaggagcccaggtgctgtcctgctggctcagcagctgtatgtgaatctgttggtctcgtgctcacagcctgtggggcagccacagggccttcgtgctttgggccggaagtgtcctcttcatggtctccactgtcaatctgaacagctcttcctggcttcacactactgtggccctctccaggaggcgcctcttcatgtcctttccccagctttctgtggggctgtgcgccctgttctcagggatggtctcactgaccccacccctccaggcctccagaggctgcacaggctgcggcgaccccactccagcagcgacgctttccctgtgggcccagcacctgctggctcctgcgagagcctgtcctcgtcctcctcctccgagtcctcctcctctgagtcctcctcttcctcctctgagtcctcagcagctgggctgggggcactctctgggtctccctcacaccgtacctcagcctggctagatgatggtgatgagctggacttcagcccaccccgctgcctggagggactccgggggctggactttgatcccttaaccttccgctgcagcagccccaccccaggggatcccgcacctcccgccagcccagcaccccccgcccctgcctctgccttcccacccagggtgaccccccaggccatctcgccccgggggcccaccagccccgcctcgcctgctgccctagacatctcagagcccctggctgtatcagtgccacccgctgtcctagaactgctgggggctgggggagcacctgcctcagccaccccaacaccagctctcagccccggccggagcctgcgcccccatctcatacccctgctgctgcgaggagccgaggccccgctgactgacgcctgccagcaggagatgtgcagcaagctccggggagcccagggcccactcggtgagtcctcagcctaccccacccctgtccccgccagctgtcactgactctgagggcctggccccagctgaacccctctccattcatttatataggtcctgatatggagtcaccactgccaccccctcccctgtctctcctgcgccctgggggtgccccacccccgccccctaagaacccagcacgcctcatggccctggccctggctgagcgggctcagcaggtggccgagcaacagagccagcaggagtgtgggggcaccccacctgcttcccaatcccccttccaccgctcgctgtctctggaggtgggcggggagcccctggggacctcagggagtgggccacctcccaactccctagcacacccgggtgcctgggtcccgggacccccaccctacttaccaaggcaacaaagtgatgggagcctgctgaggagccagcggcccatggggacctcaaggaggggactccgaggccctgcccaggtcagtgcccagctcagggcaggtggcgggggcagggatgcgccagaggcagcagcccagtccccatgttctgtcccctcacaggttcctacccccggcttcttctccccagcccccagggagtgcctgccacccttcctcggggtccccaagccaggcttgtaccccctgggccccccatccttccagcccagttccccagccccagtctggaggagctctctgggcccccctgcaccactcgacaggggagagaacctgtactatgagatcggggcaagtgaggggtccccctattctggccccacccgctcctggagtccctttcgctccatgccccccgacaggctcaatgcctcctacggcatgcttggccaatcacccccactccacaggtcccccgacttcctgctcagctacccgccagccccctcctgctttccccctgaccaccttggctactcagccccccagcaccctgctcggcgccctacaccgcctgagcccctctacgtcaacctagctctagggcccaggggtccctcacctgcctcttcctcctcctcttcccctcctgcccacccccgaagccgttcagatcccggtcccccagtcccccgccttccccagaaacaacgggcaccctggggaccccgtacccctcatagggtgccgggtccctggggccctcctgagcctctcctgctctacagggcagccccgccagcctacggaagggggggcgagctccaccgagggtccttgtacagaaatggagggcaaagaggggagggggctggtcccccacccccttaccccactcccagctggtccctccactctgagggccagacccgaagctactgctgagcaccagctgggaggggccgtccttccttcccttcaccctcactggatcttggcccaaccaaatcccttgttttgtattttcttgaaccccgaccactaccccaggtttctaactttgtaacttgcttctgatgtgggtccctaacctataatctcagcttccctaccctggactgaagggtctgcccatccccccaccaccctccatcctgggggccctcgcacaaatctggggtgggaggggctaggctgaccccatcctcctctccctccaggagcccccagcatgtcctgacctgtgcacggggatggggggacaactcctacccttctttccccacatgccccactaaaccatctgacaacattaatgaataaaatggtgaaaatgtggctgctgaagtcgttctggggccaaactcagtgagtgaagacagacagagggggcactttatcattctatttccttttggggaggcaccaaggcaggagttactcctgggagcctctgagaggtggtatctgcagagaggggaaccatgggcaccctgggagtctaggtcaggagtggggctcaggctgggcttttctccaagctgacatcctttttgtagctctgctatgatctcctccagcaggtccatcctggggagcagtgaggcacaggtagacctagggttacctcagggataaagacctagggttacctggggtcctcccatccaaggcctcgggtctcacttctgcaggctggagaagagacctcctctagtcagctcagtaccgggtgcctgcaggagagaaggctggagctgccacctggtagccatggtgctccagcgggcctgggagggcagatggggcacaggctgagctcggggtcctctgcttagcctgccctcgtggccttccctgccagcagcctcccagtgtgtgggaagcctccctgtgggtcagcaggctggggatgggctcacagggctggggctccagcagaataaccctgtgtgtgcgccgcagcagcccctgcagggctggaatcttggctgagagcttcctcaaactgttccgcagagctctgggtccccagcagggaggctgagtcctagaggctggagttggagtgcagggaagggccctgggggaagcagggttggttaagggtcataggtgagtgaggggacagttgggcgaccctaaagttccctggtcaaaggagaggcagccagggaacttcgggttggtgactcctggagggcgggcggagggggtcacaggttagcagtgggacagttgtgcagggctctgggggtatctgtactgttgagctgggctccaggcagcagtgcaggctgaccctggctgtggggctgtggccagacccagggctgggtcctgggctgggcccagagctgctgcctagagtcaagctgctgcccaagttccaggctgcaccccttgggatcctgctgtggtctctgacctcaggagtctcaggcctgcagagaaggatggcagagagctggcatgggttgcccaggtgtcccacagctcccttggtcccccacagccccgtcctggctcctacctggcatgggatggggcctggggacatcacaggggccacaggcctgggtgtggtcttggctctgtgagccacttgatgtacagtttctctgtggggacagaccagttggtcagcacctgccagcatcccttccttgccctctaacttggtggggaaccctggggtgcaggggatagcgtggtccactccattggggagctcacctcaggagccacgtcctgtggaccggaggctgggtgtggggacacaggcttgcctggggtcccatggccaccacccaccccctgctgacctgccctgtacctgggccggggcctcccgcagtaggtatcgggtactctgcaggctgccccagcggtcagcaggtgctaggcctagcccagctcgaatcagggcctggtagggtgctggcacccggggctccagggccggactctcccctgcctccagcttggccttcacctcaggtccccctctcccagcccagggcagctctcctgccaggaagcacagttagggacccaagcgggagggtgccttcatggggtggggcgcagccactcactcaccagtgaagacctcctggatcaggatgcagaagctgtagaggtctgaggtggtggtgggcatgtcaccgcagatcagctgaagtggcagccatgggtgtagttcagggggcgggggaagccctgggcctgggcctccccaggggtagcccttctgctgcctgtggagcccaagggccctggtgagccgacggctgctggacagggacctgcacccgccaccagacaggaaaactgagaccccaggtcacacagcccagcagtggtagggccagcacctagctcctatgccactcacagtgcccctctccacccccacctcctccctggggtctacaagacaccactgcccatggccacggaggctggagaacagggaggaggggagcgtgcaggcccgagtcaaggggcagcaggcagggcaggcactcacctgggccgcagccagcgctggcgtaggaggcgcctgtgctccaggtggcccactttagccaggcctggctgcaccagctacacggtgtgagagctgaagccactgtgagctcgccagtgggcctgcaggaacagcagggcctttagcacctgctgcagcagggggccggggcggcaggcccagcacagtcccaggtgcctcctcacttggtctcggtgggtgcagcaccccctgcagggagcccagccacacaggctcaaagagaaggcacagccccgacagatctgcagagggactcagtgccatcagcagcaacaggccagggtggtgcagcttgctgggcaggaggacagcaggccactcacgagcaggccccagccacacagggtgggagatgctcctgggcccagactgcccaccacgtgccagggcaggcaatctgcacctgccatcagacagaggaaagactgatcccaggtcacgcagcccagcagtgggagggccagcacccaccgcctacctcatcctggtgccttccacacccccacctcctctcaggcctacagggcattgcacacacaactggtacccacccactttccagtggggggatcgccccagcagaagggctccatgccgggtgctggcccagaagtgaagattctggccatgactacggccacacacccttgtcttccgtgggagggccaacaggaggcggggctgggggctggcacaggtacctgcagtgctgaaggtcagccagtagcacatctgtctgggttccaggggccttcggctgctgcacagtcattttgtgacccatccacaggaggctggagaataggggcggggcagtacaggcctgagacgagggggctttccctgggaggggagcaggagagctggcaagggcacagcggggctctcacttggccatgagggtggggagctgctctcataggtgcagtcaggctctccctgggctgccagcagctccttggggtccacaagggggatgcccgttaccagccccggtggccacaggctactcagctagggacaggcaggatcatgaggcacgaagaagacaggggtggttcccactcctacagccactcctgcttacctgaccaaaccccaaggccgggacttgggaggctctcctgatctgtgctagcctcagcatcctggggtgggggcaggccgagggtaagtctggggtggctgggaatggttgggcgggtgggcttcaggatgtggacggttacctgtctgcctgcatcagcctcagggaggacagggagccaggcgggctgttcccaaatctggcctgcaactggtccagagatgccatgggtggcaactcaccgtcatgcacgaacgctgatatgtgggcccggcagagctgcaacaactccagcaactggaggagggcacgtagggtgaggcctgatgggtgccggccctgatccctcactcccaccagggccactgctcacctcccagttctgcttggccccaccctgctcagcccagtcttgtggtgtgcgaccccgctggtcatgcagttgcaagtcaccccctgcctgcagcaggggcaccatcactaaagaaggcgcctgcaggcacgggggtgctgccatccaggcagcggttagagcagaacaacgcggtgggagtcgattagggaagggactgaacagggacaaaaaggggcaggatgggggccctgggggatgggaggagtcaccatgtcatgggaggtgaatatgaggatgggaggggtcacatgagggcaggatggggtctttagggaatggaggatcactacgagcatggaggcactgggagaatgggaacagtcactggggaatgagaaggggttaattgagagaataaggagggttactggggggacaggagggtcaccagggaatggaagaggcatctcgagggagagatgcctcaggggaagagagccctagctctcaggctttctggggctcaaacttgggcccctggggatggggggcatcactggctggccagccactggttgggcttggcaccaaaggccagcaggagctgcatggcagagccgtggcccagcagcgccgagaggaagagcgctgtctgcccctcagagttctccccgtccacctggacacctaaggggcaggcaggcttaggacgccccaggcccatactcctgggttggaggcctgagggccgctaggcaaacacccttgccaattcccatcctccacagcccctccatgactggatgactatggaccccaggttccatctctgtgtcctggaacccctgccctccagctgctgaggaccatgcctcgcaatccacctcaacacagtgctccccaaatcattaagtccacagagttgaaacaaggggtgacatctgcctgctgtgcaaacatctatcccccaacccagggggatcaaaatcacacaaaggtccccatgggccaggaggaagtggatttcaggggactttgacttccaggagccttgcgcactggccgggacaggcggactccacccagctgtgactcagtgtggtacacacaggtcccatgaggccagcactcagcaattcaagtaaagcaaactctggattttatcagatctctcaaattttatttattttaatttttaattttttgtagagatggggtctcattatattgcccaggctggtcttggactcctgggctcaagcagttctcctgccttggtttcccaaagtactgagattacaggcatgagccaccatgcatggtctcaattttatttttgaagcctgcatctaagggctcaatccagttggcaaccccctccatgtccttacctccaggcctccgccaatcccctccccaaccatcttccagctcagctccccctcccaaccactcactcctgccccaagccctgggtctccaaacccgtcattccccagttcctcttcctccagcccctaccccaggtagagcaaatgcatggcatccttgtccttgcactcctgtgtccttggcagacacggctaattattcatgcactgggcccaacccagcgtggtctctgccacaaaacccctccaaatgtggaccttcaggaatctctgaataccagatttgcggcattgcatttgactcattagctcactatcttttacaacagcatcttaactgcctttctgcactcatcctgccccacagaggcctttttttttttttttttgagacagagtctcaatctgttgcccaggctggagtgcaatggcgcaatttcggctcgctgcaacctccgcctcccaggttcaagtgattctcctgcctcagcctcccaagtagctgggattacaggcgtgtgccactatgccaggctaatttttttttattttagtagattaggggttttgccatgttggccaggctggtcttgaactcctgacctcaggtgatctgcccacctcggcctcccaaagtgttgggattacaggcatgagccactgtgcccggcctttttttttttattttaaagacagagtgttgccaggcatggtggctcacgtctgtaatcccagcactttgggaggctgaggtgggcagatcacctgaggttgggagttcaagaccagcctgatcaacatggagaaaccttgtctctactaaaactacaaaaactagccgggtctggtggcacatgcctataatcccagctacttgggaggctgaagcaggagaatcacttgaacccaggaggcggaggttgcggtgagcagagatcatgccactgcactccagcgtgggcaacaagagtgaaactccgtctcaaataaataaataaataaataaaataaaataaagacggagtctcactgtgtcacccaggctggagtacagtggtgcgatcacagctcactgcagccttgacctcctgggctaaagtgatcctcccacctcagcctcctgagcagctaggactacagcacactccacagcacccggcccgaggtctcttcttaaaacacaaatcacttttaaggactagataatcttatatgagttgttccaaagaaaagaaaaatagaaaaagaaggcaaggctcattttatgaggctagcaggaccttaattccaaaactagatgaaagtttccagaaacagaaagtaagattatatatcaattgcatatatatgcaaaaactttaaataaaatagaatagatttatccccataaagcaaggatgattcaacataagaaaatctatcagctgggtgtggtggctcatgcctgtaatcccaacactttgggaggctgaggcaggtggatcacctgaggtcaagagttcgaaaccccttctctactgaaaattcaaaaaactagccaggtgtagtggtatgcgcctgtaatcccagctactcaggaggctgggacaggcgaatcgcttgaatctgggaggtagaggttgcagtgagcagagattgcaccattgcactccagcccgggtaacaagagtgaaactctgtctcaaaacaaaaaaacaattaaaactagtaagcaagttcagaaagtggcctgaaacacaaccaactttacaaaaatcaaaacagaaattgtacattgttaatttaatgggttattgttttgagacagggtctcactctgttgcccaggctggagtgcagtggcctgatcaaggctcagtgcagccttgaccttttgggctcaagcaatcctccctgctcagcctcccaagtagctgggactacaggcatatgatgccaccactccctggtaatttttttaaaatagagatagggtcttgctatgttgcccaggctggtctcaaactcctggactcaagcaatcctcctgtctcggcttcccaaagtgctgggattataggtgtgagccatgtggaacaggttgcccagcccaatttaatgttaattatgttaatttcctgcttacaatgccaacagtttcctatcacacacacaaaatccaacaaaactcacactcctttagaggcccttaactgtgtggacttgtggccacttcagcctcacgtctctccaagtcctgctgctactcatacatgggcagttcattttgacttcagagcgtttgcacagcctcttccatcactccccacttctttttttttttcttttgagacggggtctcgctctgttgcccaggctggagtgcaatggcacaatctcagctcactgcaacctctgtcttccgggttcaaatgattctcctgcctcagcctcccaagtagttgggattacaggcacatgccaccatgcctggctgatttttgtagttttagtagagacgaggtttcaccatgatggctaggctggtctcaaactcctgacctcaagtgatccgcctgcctcggcctcccaaactgctgggattacaggcatgagccattgcaccccaccatctctccccacttcatttcaccttttttgcgtggctgactcttatactgtaagactcaagcatcctccacctgaaaggccatactgtctagggtctcatcctcatcccactgcatttcattcccaatggtccaagggtcatgttcacccttaaagccccatcagggaccacagagctcgggacacagtcggtgttcggtaccactgctgactggccaactgaagccacaccctccatacagctccttgatcctgccgccacagatgtacctgcggccaggccctcacctctccgcaggagcctggccgggccccatcctgggcccccagccacagccaggtggtgcagacggcccacctgggtgtctagatccctcttggagcccagctccactgggaagcgcgaaagggctgcgagggcatctgtgggctgcggctcagtcggctcctgggcagggatccgctaggggggtctcatcagggaagggggatgtgaaggactggaactttgggcacaacaaaacaatgaagacagagctggctgggggtcctgggggcgcagtctagacgggaacgggatttaggaggggtctgatgggaagggaggtggctgaatgagaaaagggggtggctctgggagggcgacacaccagaaggtctggggtcgcagggaggctgagagctgagggggatctaaggcaatcgggagtctgggagggggcttagggctggggtcgggcgtgccagggtggcagaagggctgcgaggataggatccgagcttgggaaaggagtcggagggctcaggaggaggctctgaaggctgcggtgggaggatgaggcgcctgtggtttaggatctgagaggcggtgagaggggtcatggggaggctctagggacagcgtctgtggggtccgtggggtggatggggtctgagggcagcgggcgcgctctgaaggaggagagggcgctgatggcaggatctgccgactgtgcgggggtccgcgggtgggacgcgtggactaaggactagggaagtgtctgtgtgttgggggtgggggctacaggctggggaagggggctctgaggacagtgtctggggctggggaaggggtcagtggaatggggaaagggttcgctaaaggggcgggcaggggtgtggtctgagggccgcggaagagaaggacagggtgggaggggcctgagggctgggggaagggtctgagggtgatctgagggcccagaaagctctgggaaagttctgggcccacaccccagtcctggtggctttgcactcaccgttgggctagatagtggtcgccacctgactgccacatgatccggccggctgtatgagcgggaatccgaggtgcttgagcaccagtggcctcccgcagcgcctgcgcagtagcatccccttccccaacacagccccagccactcagcctgggccccacagccctgaccagtcggggctgtcactgtctgaggacggggctgtctacccacaccggactaagccctgtaaggcagggccttgggtcgttcttgtcactgttgtgttcacagcgttgttcaccccagaacctagctcaaaagaggcctcattcagtgcttttattctcactctgtcgcccaggctggcgtgcagtggcgcgatctcggctcactgcaacctgcatctcccaggttcaagcaattctccttcttcagccttccgagtagctgggattacaggcgcacgccaccatgcccggctcatttttgtatttttagtagacacggggtttcaccatgttggccaggctggtctcaatctcctgacttctgcccgcctcggcctcccaaagtgctgggattacaggcatgagccactgcacctggcgtttttctcagacaggatctcactctgttgcccgggctggtgtgcagtggcaagatcatagctcactccagcctccacctccagggctcaagccaacctcctgcctcagcctcccaagtagctgggactacaagcacaggccacccaccacacctagctaatttttttttttttttttaagatggagtcctgctctgtcgccaggctggagtgcagtggcacgatcttggctcactgcaacctccatctcccaggttcaagtgattctcctgcctcagcctcccaagtagctgggattacaggcgagtgccaccacgcctggctaatttttgtatttttagtaaagacagggtttcaccatgttgggcaggatggtttcgatctcttgacctcgtgatccgccggcctcagcctcccaaagtgctgggattacaggtgtgagccacagcacctggctagctaatttctttctttcttttttttttttttttttttttgagagataatggggtttcactatgttgcccaggctggtctcaaactcctgacctcaagcaatccacctgccttggtctcccaaagtgctgggattacaggcatgagtcactgcacctagtttcattcaatgcttattaactgagagaatggcttggctctttcttctgtccctccctcgccaagtggcctgggccgagccccttgacttcagtgccttggtgtctgctccccatgtgtgcccttcctttaggcatcccctgggatgaagaaagttctgcatcagtcactggccagacccaacccaggatggtctgcctcagaggtgagggaggcttccttagtcctccgtcaatgccctggctatgctcaatgggtgtctaacgatcttttttttttttttcttttctttttttttttttttgagactgagtctcactctgttgcccaggctggagtgcagtggcgtgatctcagctcactgcaagctctgcctcctggattcatgccattctcttgcctcagcctcccgagtagctgggactacaggcgcctgccaccacgcccggctattttttgtatttttagcagagacggggtttcaccatgttagctaggatggtctcgatctcctgacctcgttatccacacgcctcggcctcccaaactgctgggattacaggcgtgagccaccgtgcccggcctctttttcttttcttttctttttttttttttaaacacagtctcttgctgtcacccagactggagagcagtggtgcagtcataggtcactgcagcctcaaacccctgggctcaagtgatcctcctgcctcagcctcccgagctgggaccacaggcacgcaccaccatgccctactgatttaattttttgtagagaaagaatattgctatgttgcccaggctggtcttgaactcctagactgaagcacgcctcccacctcggcctcccaaagcgctgggagtataggcgagagctaccactcccagcctaacgatctctcttgaactgcaaaacccctagcttgggctggctgaggtcaagatgagcccttccccaaggaggcggcgtcagtgcaggacagcagcttaggcagcacctaaggacttttattgaccacatgaccccct

SEQ ID NO: 6985 - DNA, 417 bp, Homo sapiens
gttgatttataccaattacaagtaaatacacttaggagatacaaaagacacttcaagctaccaaccagaccaggacttaataaagcacaacttgttgagatagttggttgccactttaggtctattccagtgaatgaaaaagacaccttaacatatttcatctactcagtgaagaatgacaagaacaaatcagatctcaaggttgatagtggtgttcactaggagacgtggaattgagactaataacttggatgttaacactgtttactgttttttcacatgtagaaatgttctttgtgtattttttctacagaggattttctctgattttattttctttgttctgactctaataattagttggaactcatataaaatgagctttcctaaattaaatctattttaaataaagggtat

SEQ ID NO: 6986 - DNA, 371 bp, Homo sapiens
  misc_feature (1)..(371): n=a,t,g or c
gtgatttccagcccttcccactgggacttgacttcccaggtcaaggagtccgtctcattctggctggtcgagtgaccagaggcctgtgtgaatgtgtgmacctgcttttcctgcctggaatgttttctggctcagctgcagcaacatctgtcagcccagtgtctgccctgtgtccctgggctcgctccaagtgcaggaacatacatgcagggcccaacatgatgatggtgtgaagggcaggaaacagtcctctgaaggagtggggaggtgggcagtctgcccccgccaggtaccatcgcctcctgccagcttccttagaccagggagggctgccatggtgctagctgcaagtccatcagtattgaccgtct

SEQ ID NO: 6987 - DNA, 1522 bp, Homo sapiens; identical to SEQ ID NO: 1079
  misc_feature (1)..(1522): n=a,t,g or c

SEQ ID NO: 6988 - DNA, 474 bp, Homo sapiens
  misc_feature (1)..(474): n=a,t,g or c
cgcccacctcggcctcccaaagtcttgaaattacaggcgtgacnnctngcgccctgccagattttgtatagtaatatatatataaaatgacctgtcacaggttggctttcatagttttacctttcctttgggtggtgcccttgggtctctactactgtctttcatcactcccaagaaattgagtagtgcagccaggatcaggaccagggattggcaaatgttttttgtaaagggccagataggaaatattttgggctttgaggactgtgttatctctgaaatgatcttgttccagtgttaccatgtcaagacaaccatagatagtatgtatacaaatggaacaggtatggctgtgttccagtaaaactnatgggttaaaaacaaccacattggcatttgggctaagggctttaatttngctactgacaagtgattagtccngggcnttaattttgttttttnaaccnttacagg

SEQ ID NO: 6989 - DNA, 366 bp, Homo sapiens; identical to SEQ ID NO: 6625
  misc_feature (1)..(366): n=a,t,g or c

SEQ ID NO: 6990 - DNA, 4905 bp, Homo sapiens
  misc_feature (1)..(4905): n=a,t,g or c
agtacccctatctgaaatgcttgagaccagaagtgttttggagttcagattttcttttggattttggaatatttgcagaatacctactgattgagcatatctaacctggaaatccaaagtgctccggtgaacattttctttgagcatcatgtcaatcaatggtcaaaaagttcaggattttggagcttcttggattatgggtgctcaacctgtataggaaacgtggagatggagcatgaatcagttgtatttgatacttgctggggaaaggatttccagaccaccagagaagaaggatcacccatttaacttggtgtatccagtgccataycagagccttttcttccattttaacctcaccagtagtctttagatttgtggtttatgatcaagaaattaartcctagaatacagattagtagagcaaagttgaggcttttgattatctatttcttttaaggtttttcgctttaacactttacagaagaatttctagactgtctgagaagaatactccaggtatttgtcccagtcttaaaatggytcaacaawaagttcataatcactttttagaacccttttcccaaaagaactgtgatcctacgtgtaacttaaaaaaagaaaacacacaaatgcttgcatcttttttcacatatttatctgtattcagcaatcaagaatagctggtactgatggatatctttacatgatttttcgttatttatctgaaaataatatatattgggtcattatttggcttttcaacctcagtaattcagtaactttctttcagttaattttgttgacctgttttggacrcttttcaaaatattcttagcatgattttactgggaagaacacattattacaagagttaggcagtctgagtccacctccatttgtgtccatcctctctcgtttgtttattgaatgccttcacctgtgctctgaattgcatctctttccttctcaggaaattttatacattgtcaattattccttctctctaacttcaacctcgccttctttgctgagtctgacccatcaacagttaaacatgatcaagtcttccgatttaaaagtccctctttcttgacacagctcatttatagccaaacttctttctgaagagtagtctacattcattttctttttctccctcacttctgataatattgagcgaactccattttagtttctgtccctatcattcctctaaattgattaaggtctccagaatattcctctgtatttacgggcattattcactgctcttcttatttgactactcagcaagcatttaacttttgatcagtttttccttaaaatactttacttggcttccttgacatcatggtttttgttcagatctctgtggttatttcygtctcctttgctgccttctcctcttggtccttgaattttagaattcttcaaatttcagttctagacratcttctgttcttactcttagctttccctatgtggtctcatcatttctcatgtggacatagtagtctccccacttttatttttgccaccttacaattttatccacagagcagctagagtagtctataaattctttttaaaatacgtaaaatcactcactgcttagacactacataatctagtccttggctgcttctctgaccctgtcttataccagtctgcatttactacagtccatctatactggcctctttgaactgttcttcagatatgataagcttgtccttgctaaaagctctaactgttatttctgcttggaatgctcttctcgtctactcttcctatgcctagcattttcttaatgtttaggtctcacctgagatgtcactttcactgtagtactagtagttgatgttactactgattcgttggcagtattcctgaaatagaatataggataaatgaggacatgtttattttgttcacagctgtgtccacaaaatctaacacagtscctgtagtactgtaggagctcattaagtagtcggctgattgatttttgtacctaatggttctattaacaatattgacccccaaatgtattttcttcataaccttctcctctgaactccagtctgtatatttaactgtctacctgacatttccycttctaagcttaaaagctcctccaattgaacctgtgatctctttaaatctaggactccaggatttcctgccacagtgaatggatttacctytcatctatctctgtaagctagaaagttgggagtcttcttcaatgccttctttccccctcatattcaatccatcaaatggattctatggactttgccacctgaatatctcttgaatctgttcctacattttaaactaccatcatttgatggattttcacacagtgagtgtatctatataattaatacccaggtcaggaaatacgatattactagcaccycagaagctccttgtgccctctctctgtcagagtgatctttttaaagggaaaatgtgatcatgcttaatgcctttcagttgcttcccattgctcttagaataaagaccagaaatcataatgtgatatttaagatcctggatgatgttactgtttttcctatgcaacttcatgttttttaaattatttttctcactttctgtattccagccctgataaccacctctcaattccttgaatgtggcatgctgttccctcttgctaaaaaattctatgtacacataccccttccgttcttgtccgtcagatttgagctcttcaaagttttcttggacatagcaagcttgatgaggtcccaaatacatcttatgtgctctcatatgctttattcatttgtatattattatttcccttatttttaagctaatgagtcaggtattacacctgttttgctcactgttgcttggtcatcagctagcatggtggctgggaaagattagtattcaatattcatacaataagtgaatatgagtagtttgggtttgttatgggatgaattatccatccccaccccccactcccacacacagacacccaactgatacactgaagattaaaattctaactgntagaacctagcaatgtaactgtatttggagatggggcctttaaaaaggtaatgaagataaaatgaagtcatatgggtggactccaattccatatgagtggtttccattaagaagagattagsacacagacacacagaaaggtaagaccatgtgaagacactggaggaagatggccatctacaagccaaagagatctacaggctttagaagaaaccaacactgctgacaccttgatcttggcctyctagaagtgtgagaaaataaattctgynctttcaactaccacaatctgtgatactttgctatggaagccctagyaaacttatatggattttggtattggnaaagtggggtgctggtgtaattaatacctaaaaatgtggaattggctttagaactagataatgggtagaggccagaagaagtatttgttagaaaaagcatagactgccttgaagagattgttggtagacatatggatgttgaaggtgattctggtgaagcttagaaaataggagagctgttgagaaagcttctgtcatcttagaggtatacatatgtcaccttgaataaatattggtagaaatatgaatgttaaaggtgtttctggtaggaactcaaacaaatgaggaatatattgttggaaactgagggaaaggcaatgcttattataatgtggcaaatagccaaattgtgttttgtggaaagtggatgaacttacaaagtgatgaacttgaatgtttagctgagatttctaagcaatgyattaaagatatggsctggtttcttcttgctgcttaaagtaagatgcaagaggagagagagaaatttaagaaggaattattaagccaaaagcaaccagagcctgaagattcggaaaattctcagtctatccatattgcaaaaatttagcatgttctggagggaacatcaaagttgttgcaagacaaccatttcctaaagcaattagggatatgtgacttgtggatccaatcagccatcttggcagcaactagcagaagccaggatagagatggggttatacctatggaaatgctgctggctggtaccgaagggaacagagggataaaaatgaaggaagtctgttggatttcttgagattctataaaatgggtcagtagagctatctggctgtgaacatgtgttcttcaagaagagggaagaatgaccctgaagattattgagaaggcaaagsggctactattgctaccacaggacagagggctcaggcctgacgagtcaacgcaggctacttcttagsgctgagggaggtgggctaccacactggtgggctcagaagacagggctgccacccctgttaggtgggaagatggagaatgaagctgaagaagattattcttgagccttaaaatctaatgggatttgcctttatacgtttcagacctgcttaggatccatcaccccttctttctgatttttttggaataggaatgtttatcctatgcctgtctcaccagtggtgtattttggaagcaaataacttgtctagtttcacaggttcatgctggagaagaattttgcctcagggtgaaaccttgagtatgcctgtacctgatctaaatgatatttagatgagatttggggcttagagttgatactgaagtgggtcaagactttggsgctgttgggatggagtggatgtgttttgtgtctgagaaggacatgaattttgaggggscagatggcagaattttaggggttgaattgtatgctctccaaatgtatataagttaaagtcctaactcctagtacctagaatgtgaccatatttggagatggggcctttaaaaaggtaaaaaaaaaaaaaaa

SEQ ID NO: 6991 - DNA, 1816 bp, Homo sapiens
  misc_feature (1)..(1816): n=a,t,g or c
ggcacccagggtccggcctgcgccttcccgccaggcctggacactggttcaacacctgtgacttcatgtgtgcgcgccggccacacctgcagtcacacctgtagccccctctgccaagagatccataccgaggcagcgtcggtggctacaagccctcagtccacacctgtggacacctgtgacacctggccacacgacctgtggccgcggcctggcgtctgctgcgacaggagcccttacctcccctgttataacacctgaccgccacctaactgcccctgcagaaggagcaatggccttggctcctgagagggcagccccacgcgtgctgttcggagagtggctccttggagagatcagcagcggctgctatgaggggctgcagtggctggacgaggcccgcacctgtttccgcgtgccctggaagcacttcgcgcgcaaggacctgagcgaggccgacgcgcgcatcttcaaggcctgggctgtggcccgcggcaggtggccgcctagcagcaggggaggtggcccgccccccgaggctgagactgcggagcgcgccggctggaaaaccaacttccgctgcgcactgcgcagcacgcgtcgcttcgtgatgctgcgggataactcgggggacccggccgacccgcacaaggtgtacgcgctcagccgggagctgtgctggcgagaaggcccaggcacggaccagactgaggcagaggcccccgcagctgtcccaccaccacagggtgggcccccagggccattcttggcacacacacatgctggactccaagccccaggccccctccctgccccagctggtgacaagggggacctcctgctccaggcagtgcaacagagctgcctggcagaccatctgctgacagcgtcatggggggcagatccagtcccaaccaaggctcctggagagggacaagaagggcttcccctgactggggcctgtgctggaggcgaggccgcggccccagagtccccgcaccaggcagagccgtacctgtcaccctccccaagcgcctgcaccgcggtgcaagagcccagcccaggggcgctggacgtgaccatcatgtacaagggccgcacggtgctgcagaaggtggtgggacacccgagctgcacgttcctatacggccccccagacccagctgtccgggccacagacccccagcaggtagcattccccagccctgccgagctcccggaccagaagcagctgcgctacacggaggaactgctgcggcacgtggcccctgggttgcacctggagcttcgggggccacagctgtgggcccggcgcatgggcaagtgcaaggtgtactgggaggtgggcggacccccaggctccgccagcccctccaccccagcctgcctgctgcctcggaactgtgacacccccatcttcgacttcagagtcttcttccaagagctggtggaattccgggcacggcagcgccgtggctccccacgctataccatctacctgggcttcgggcaggacctgtcagctgggaggcccaaggagaagagcctggtcctggtgaagctggaaccctggctgtgccgagtgcacctagagggcacgcagcgtgagggtgtgtcttccctggatagcagcagcctcagcctctgcctgtccagcgccaacagcctctatgacgacatcgagtgcttccttatggagctggagcagcccgcctagaacccagtctaatgagaactccagaaagctggagcagcccacctagagctggccgcggccgcccagtctaataaaaagaactccagaacaaaaaaaaaa

SEQ ID NO: 6992 - DNA, 14796 bp, Homo sapiens; identical to SEQ ID NO: 4000
  misc_feature (1)..(14796): n=a,t,g or c

SEQ ID NO: 6993 - DNA, 494 bp, Homo sapiens
  misc_feature (1)..(494): n=a,t,g or c
ctttgaagtatttattgttattttctttgacttatgggaaaactgggacacaggaagacaggtaaattacccaacctcacacgttaagtcagaactgggagccataattttgtatccctggtataaatagacaatctctcgaagaaatgaagagatgaccatagaaaaacatccgagatatctccagctctaaaatcctttgtttcaatgttgtttggcatatgttatctttggaatttagtgtctgagcctctgtctgttactgtagtatttaaaatgcatgtattataatcatataatcataactgctgttaattcttgattatatacctagggacaatgtgtaatgtaagattactaattgggttctgcccaatctccttttcagattttattaggaaaaaaaaataaacctcctggatcggagacaatgtattaaatcagaagtgtaaactgccagttcnatatagcatgaaatgaaaagacagctaatt

SEQ ID NO: 6994 - DNA, 432 bp, Homo sapiens; identical to SEQ ID NO: 4001
  misc_feature (1)..(432): n=a,t,g or c

SEQ ID NO: 6995 - DNA, 484 bp, Homo sapiens
  misc_feature (1)..(484): n=a,t,g or c
gccctntctctctcctctttctcccctttcccatctccctctgccttcccctggcactctctctctagaacgggcagctgctgctgagtngggaggagccctggcagtgggggctgtgcgtcggtgctcagtgccatggncttcactggggcaggaatcgccgcgtcctccatagcagccaagatgatgtccgcagcagccattgccaacgggggtggtgtttctgcggggagcctggtggctactctgcagtccgtgggggcagctggactctccacatcatccaacatcctcctggcctctgttgggtcagtgttgggggcctgcttggggaattcaccttcttcttctctcccagctgaacccgaggctaaagaagatgaggcaagagaaaatgtaccccaaggtgaacctccaaaacccccactcaagtcagagaaacatgaggaataaaggtcacatgcagatgcatcaaaaaaaaaaa

SEQ ID NO: 6996 - DNA, 439 bp, Homo sapiens; identical to SEQ ID NO: 4906
  misc_feature (1)..(439): n=a,t,g or c

SEQ ID NO: 6997 - DNA, 2492 bp, Homo sapiens
  misc_feature (1)..(2492): n=a,t,g or c
cccgggcgggcgagaggctctcaactgggcgggaaggtgcgggaaggtgcggaaaggttcgcgaaagttcgcggcggcgggggtcgggtgaggcgcaaaaggataaaaagcccgtggaagcggagctgagcagatccgagccgggctggctgcagagacaccgcagggagagcctcactgctgagcgcccctcgacggcggacgggcagcagcctccgtggcctccagcatccgacaagaagcttcagccatgcaggccccacgggagctcgcggtgggcatcgacctgggcaccacctactcgtgcgtgggcgtgtttcagcagggccgcgtggagatcctggccaacgaccagggcaaccgcaccacgcccagctacgtggccttcaccgacaccgagcggctggtcggggacgcggccaagagccaggcggccctgaacccccacaacaccgtgttcgatgccaagcggctgatcgggcgcaagttcgcggacaccacggtgcagtcggacatgaagcactggcccttccgggtggtgagcgagggcggcaagcccaaggtgccggtatcgtaccgcggggaggacaagacgttctaccccgaggagatctcgtccatggtgctgagcaagatgaaggagacggccgaggcgtacctgggccagcccgtgaagcacgcagtgatcaccgtgcccgcctatttcaatgactcgcagcgccaggccaccaaggacgcgggggccatcgcggggctcaacgtgttgcggatcatcaatgagcccacggcagctgccatcgcctatgggctggaccggcggggcgcgggagagcgcaacgtgctcatttttgacctgggtgggggcaccttcgatgtgtcggttctctccattgacgctggtgtctttgaggtgaaagccactgctggagatacccacctgggaggagaggacttcgacaaccggctcgtgaaccacttcatggaagaattccggcggaagcatgggaaggacctgagcgggaacaagcgtgccctcggcaggctgcgcacagcctgtgagcgcgccaagcgcaccctgtcctccagcacccaggccaccctggagatagactccctgttcgagggcgtggacttctacacgtccatcactcgtgcccgctttgaggaactgtgctcagacctcttccgcagcaccctggagccggtggagaaggccctgcgggatgccaagctggacaaggcccagattcatgacgtcgtcctggtggggggctccactcgcatccccaaggtgcagaagttgctgcaggacttcttcaacggcaaggagctgaacaagagcatcaaccctgatgaggctgtggcctatggggctgctgtgcaggcggccgtgttgatgggggacaaatgtgagaaagtgcaggatctcctgctgctggatgtggctcccctgtctctggggctggagacagcaggtggggtgatgaccacgctgatccagaggaacgccactatccccaccaagcagacccagactttcaccacctactcggacaaccagcctggggtcttcatccaggtgtatgagggtgagagggccatgaccaaggacaacaacctgctggggcgttttgaactcagtggcatccctcctgccccacgtggagtcccccagatagaggtgacctttgacattgatgctaatggcatcctgagcgtgacagccactgacaggagcacaggtaaggctaacaagatcaccatcaccaatgacaagggccggctgagcaaggaggaggtggagaggatggttcatgaagccgagcagtacaaggctgaggatgaggcccagagggacagagtggctgccaaaaactcgctggaggcccatgtcttccatgtgaaaggttctttgcaagaggaaagccttagggacaagattcccgaagaggacaggcgcaaaatgcaagacaagtgtcgggaagtccttgcctggctggagcacaaccagctggcagagaaggaggagtatgagcatcagaagagggagctggagcaaatctgtcgccccatcttctccaggctctatggggggcctggtgtccctgggggcagcagttgtggcactcaagcccgccagggggaccccagcaccggccccatcattgaggaggttgattgaatggcccttcgtgataagtcagctgtgactgtcagggctatgctatgggccttctagactgtcttctatgatcctgcccttcagagatgaactttccctccaaagctagaactttcttcccaggataactgaagtcttttgactttttgcggggagggcggttcatcctcttctgcttcaaataaaaagtcattaatttattaaaacttgtgtggcactttaacattgctttcacctatattttgtgtactttgttacttgcatgtatgaattttgttatgtaaaatatagttatagacctaaataagct

SEQ ID NO: 6998 - DNA, 1364 bp, Homo sapiens; identical to SEQ ID NO: 6469
  misc_feature (1)..(1364): n=a,t,g or c

SEQ ID NO: 6999 - DNA, 1017 bp, Homo sapiens
  misc_feature (1)..(1017): n=a,t,g or c
gaattccactttaaccgctacctcactcgccgcaggcgcatagagatcgccaacaacttgtgtctcaatgagagacagatcaagatctggttccagaaccgcaggatgaagtggaacaaagattccaaaatgaaaagcaaagaggcactttagaggcaggggggaggcccgcagagcgcagcccctagccggttcctgtccctgcgcctttccttttcncctttcctctctatatttcgggtcgggggcaggtgctggagcactgggctcccggncccnacacagacaaaagcncttttccttggcattccgcatccctaccgacccagggttcccgcggggctgtcggcgctgcccatctcccctcagctcggctcagctcggtacccggggcccagggcaagctccgcaggacttccccggagntgcggcgtacaggctggcgcagaacgaaccttggcctgggcgtatctccggctcccagcctcagcgcggccctcccgagttaaggtgggcccggcccgcgnccacaggaccctcgccggaccctctaacctcgccctctcctttgttcccggctggacggnttagacagccaaaggntggcgagagtctggccctagactcggggtgcttccttgtagcgactaaactagattttcacttatgaatgatttgcatatgaaaggagagcatcggcctagggncccacagttgctctatgctttccaaaccttatctccacaacctctnnnncccaaaacccgggaacctncccagcctgcgcctgctgcatgccctctcaggccggcagccccagcctgctagctagctcaactagtggggtttcctggcactggaccccagcaagtggtcctagaggccctttgctgtcccatagtccctgccacgaatttctgtgccctcctgacccattgctgttgtcnaactatttattgactctgggtccttcctgaaactatattttgtcatatcaaataaagagagaacaggact

SEQ ID NO: 7000 - DNA, 273 bp, Homo sapiens
  misc_feature (1)..(273): n=a,t,g or c
cctttttgagttgttttgtttttatttttaaatgaagtttccatctgtacacgttaagaaaataaacaaaacaacaggaagccattctctgtgtatcctccttggagcaggaaggatggatctgccgatancgaccaacagcacacagccagggctcatgggagtgagtgcccgtcacctcacgaaggtcatgggcctaaaacatacggaggctccataagaaaatgctccagctggctttgcagtcatgcataaaggtgaggacacttaaat

SEQ ID NO: 7001 - DNA, 480 bp, Homo sapiens
  misc_feature (1)..(480): n=a,t,g or c
taaacaaccaacatttattttctcacagtcctggagattaaaagtccaagatcaaggtgctggcagggctggttcctggtgaggtctctcctcctggcttgcagatggcagcattcttgttgtgtccttacacagcatttcctctgtgcacatgtggagagacaaacctctggtgtctcttcctcttataaggacactagtcctatgggattagggcctaactcttatggcctaacttaaccttagtttcttaaaggccttatgtccaaatacagtcatgttggggtttaggacttcaacaagtaaatttggtggtggtagaggccagcatttggtggtgctggtgggaacacaattcagaactgaattcacaattcaattcacagtggactcttgtgaataaagtataaaatttaaccagcattccactttaacaatgcataaaaatagtccctaaatttgggttatgagccatcttaa

SEQ ID NO: 7002 - DNA, 437 bp, Homo sapiens; identical to SEQ ID NO: 4004
  misc_feature (1)..(437): n=a,t,g or c

SEQ ID NO: 7003 - DNA, 456 bp, Homo sapiens; identical to SEQ ID NO: 4005
  misc_feature (1)..(456): n=a,t,g or c

SEQ ID NO: 7004 - DNA, 443 bp, Homo sapiens
  misc_feature (1)..(443): n=a,t,g or c
tttttctttctttttggctgtttttagttttttcttgatttcaaatcttcttttcaacacctccctcttctctatgcgattgaacagttcttgctctctctctttctctgtcatctgttccagacgggccctgtcttcctcatctcccatgaggtcttctccatagccatcatggaactcttcatcttctgaggaagagtctgaatctgaactggaagaggagctgttgctgtcagagtctgacacttcaccttcctcaggggctgagctctcagctgaactgtctttgtctgaactgcctgaggaggcagttttgttggcctgtttcttcatggttcctttcttctctatttttctggcttttcctttcttcttatttttatngctcccaaatgtccactcatcgtcactgtcagacgtctccgagtctgacgaaggctgca

SEQ ID NO: 7005 - DNA, 261 bp, Homo sapiens; identical to SEQ ID NO: 860
  misc_feature (1)..(261): n=a,t,g or c

SEQ ID NO: 7006 - DNA, 318 bp, Homo sapiens
  misc_feature (1)..(318): n=a,t,g or c
ttttttttttttaccagtcaagcactttttttatttaaaaaaaaaaaaaggaaagaagtcaaatggtaaagtatatagcctacacatgctacagctagttgttctcacccctcccctcacatcctatatactcatttatttaatgtgttaaaggaaacaaaaaccaccaccggaatgccaatttgccaagagggtagagtaagtgtggggatctccagcgtcatcctatgagcagacacgaggtggtgggcagtgccnttggttcctggagggaggtaagaaatggcctgttacttggaagctccccaaagcaggaaa

SEQ ID NO: 7007 - DNA, 518 bp, Homo sapiens
  misc_feature (1)..(518): n=a,t,g or c
aaacattgaaaattttattttcacaggggatttgcataaaaagaacattatttttgttctgtgtatatataagtatttttgtttccttaacttgtttctgttgcccacacacaactaggagaagatgcttttctttattttggtttggccaaagatgctaatggttaaattatgaaggactttgttttacttatgttaagtggtgaaaactgtagttcttaatctatgaagaattctctaggtggctatacaagaaaaatacaaaaagttaggaaaacatgtaaacgtaagttatgaggtatttcatagatacagtgcccatacaaattctcttcctacnattttcaactgccagatctctgctttagtctttttcctatatttggagaaacagaagagttgacataaaagtcccttgaggatgtgaggggtgccgtagtttacagcagggtcagaaaatgacngtaatanagcatatttacatggttntggataggaaccaaatattcctaaaaagt

SEQ ID NO: 7008 - DNA, 465 bp, Homo sapiens; identical to SEQ ID NO: 1102
  misc_feature (1)..(465): n=a,t,g or c

SEQ ID NO: 7009 - DNA, 350 bp, Homo sapiens
  misc_feature (1)..(350): n=a,t,g or c
ttttgtttttttccaacaatatttgtaccgtttttatttgtaaaaataaccatctgaatgcatttccatagtatattacagttaagtacttcattacgttattagagcattcagtagttgcaaaagtattaaactgtgcttgagaagattcagattgtttcaaagtcattcactgaactaaaagtcattttccccatttttacagtcatgacatttaccagagtcattcaactccaatttacataagaaaacattatagacaaaatcccactgaaatcatcaaacaatattttatgctgttacaaatatgttatgcaaaatataacactggcaccagatttgtatcatcg

SEQ ID NO: 7010 - DNA, 264 bp, Homo sapiens
  misc_feature (1)..(264): n=a,t,g or c
tctgctcgctgctcttcgccattcttctcgccttcctcctcgccatcgcctacttgatcgttaaagagttgcatgctgagaatttgaaaaatgaagatgatgtagacactggactattaggattctggactctacttataatatccctaactgctggattctcctgttgcagcttttcttggacagtgacttactttgattcttttgaaccaggaatgtttcctcctactcctctttcacctgccaggttcaagaaactgactg

SEQ ID NO: 7011 - DNA, 464 bp, Homo sapiens
  misc_feature (1)..(464): n=a,t,g or c
gttattgtttttttttttttctactactaattcctagtggtgcacaacgagtttctgagaacacagtaataacgccaaagtagcagtgcatctgagaaacataatttttacctcgttgctttcccaaaaataaatatctcagtcatggaaaacactgtttatttgaaaacaatgagacctcaaatatgaaatatagttaacaatgacattgacactgttgctagcactttcccctaaaccacccgtaagtcttggacgcatgtgcatgcagcacacacacacacacacaaaaaccaaaaacaaagccaaaaaaaaaaaaatcccaaacacaacaatccatgattgttcaatgactcctgatgccgggatgacaggctgttaaaagaatttgtctcccacaatatctctggagtgggcacaaagccatcacctgttagtgatcacagacattcagttaacctgtc

SEQ ID NO: 7012 - DNA, 376 bp, Homo sapiens; identical to SEQ ID NO: 900
  misc_feature (1)..(376): n=a,t,g or c

SEQ ID NO: 7013 - DNA, 375 bp, Homo sapiens
  misc_feature (1)..(375): n=a,t,g or c
tttttggtttggcatagtttattacaattagtgtgcgcataaaaccatgtaaactctacaaagtaaaccacttcccctccacactaaccagcagctagtctgccatgaccttccagcacccccattattttaacatatatacatttcacaggatgtaataaccacacaaatagggttataatacattcttcagggaaaaaaatttttggtccatattttctattaaaaaaacacacacacttccctctttggcaaaagaggttaaatctcccatagttaactcacaaaagaaactcaaataaaaactactgagcatgaggtacagctgatgtctggactgttctggaattacagacgcctccttgaggggaaaat

SEQ ID NO: 7014 - DNA, 418 bp, Homo sapiens; identical to SEQ ID NO: 381
  misc_feature (1)..(418): n=a,t,g or c

SEQ ID NO: 7015 - DNA, 385 bp, Homo sapiens
  misc_feature (1)..(385): n=a,t,g or c
ctctgtacagtttttaattttttattttttgatgtttgttgttcagatgaatgacacactcaagttacaaaaatggggccttaaaagaagcacattgtacaatgaacaagcagattggagttaagaacactgaaacactaacccgctaccacgagaagagacggagggggtacaggaagggaaggaaggggctaccaacacaggggtcagacggaactgaaagggaggctaacttggtaaggatggaggaaaggcaggtctactccagggctgatttctggatgccggttcctgggcacccttgccttgtacttgccaccccctccaacttcacccacccccattccaacctggtcattctgggtggtgaaagacacccacacca

SEQ ID NO: 7016 - DNA, 435 bp, Homo sapiens; identical to SEQ ID NO: 6638
  misc_feature (1)..(435): n=a,t,g or c

SEQ ID NO: 7017 - DNA, 353 bp, Homo sapiens
  misc_feature (1)..(353): n=a,t,g or c
ttttaaattgccaggttttattaagataattggcaaaatttcaacatacaccttacctgaatgaacacttttaataaaatatgaaggatcactcatgactacaactgaactcaaaagtgagatgtagagcagatttgtaaattgataaatttatttggtaagaaattattcacttcattcgcttcactccatagagaattctttgcagagaaatgttatgaacaagagaacaaagcctgtctctcaccaaagagcacctagagtaagagtttacaatgatgtatctggattatctaattcatcaaagtttatttccttttcaaaaacaactgctgtgtcagtctggagttccc

SEQ ID NO: 7018 - DNA, 372 bp, Homo sapiens
  misc_feature (1)..(372): n=a,t,g or c
ttttttttaagataaggaatgtgtgtttagctttaatgtctattaaataggttggaaaaacaggccaagtgtagggacctgactcctgcaaagggcctaccgcagccctctgcactcaagcagcagccccatccagaccaggagtgtgttctgttctcctggcaggcagggctgataggtgtaggatggcgtctgtttcctttggagtgtgggctggtcagaggagaaacagcaacttcctgctccttctcactgtgtcgttggctcaccatagaccacgtcctgcattccctctgattctctcatggggagagccctggaccttctggtggtgtcccagctgggtgggttcaaggctgctaccccgcttgg

SEQ ID NO: 7019 - DNA, 430 bp, Homo sapiens
  misc_feature (1)..(430): n=a,t,g or c
ttttcaggattcttttgttttattgataacagaaactgtgcataattacagatttgatgaggaatctgcaaataataaagaatgtgtctattgccagcaaaatacaattattccatgccctctcaacatacaaatatagagttcttcacaccagatggctctggtgtaacaaagccattttagatgtttaattgtgcttctacaaaaccttcagagcatgaggtagtttcctttacctacgatattttccacatttccattattacacttttagtgagctaaaatccttttaacatagcctgcggatgatctttcacaaaagccaagcctcatttacaaagggtttatttctttctactcaatttttcttaaaaagaatttcaagaatcactacacagctaagatatctgagacttgcaatggctggagt

SEQ ID NO: 7020 - DNA, 252 bp, Homo sapiens
  misc_feature (1)..(252): n=a,t,g or c
ttttttttttttttaaaagcttcaagatgcttttatgtcaagggtgtggggttgccctgcttggcctgcagtgctttggggccccatgtggtggaggggtgggcaccatggtacccaccaccctgctgcctgggcagaagtgcaacatggcacacgatgcctgggggatcactccccccagggactcatggtcagtgtccactcacaaggcctgcttccctcatgacatctggccagtgacacccacagggg

SEQ ID NO: 7021 - DNA, 401 bp, Homo sapiens
  misc_feature (1)..(401): n=a,t,g or c
ttttttgtttgtacactttaagaattttattgtgggctgtaatttctttagacttcaatgtcaggacttcaacttgcaaggggagttgatcttgtgtttagtttttcctgggaatgagacgatgggggttgggtggtaaatttatggtcaagtttggggcatttgcacattggcttgtaactggagtaagttgtggtgttgtttaattttgtcgaggcttgactggaacatatggctggaaattatttgggactgaaagagaagcggtagtaaacatttgccttaggtaaaatgtagctttgggatgaaacttttttaaacagctttactgacatttaattttcacatacctcacccacttaaagtatacaattcagtggttccgagtatattcacaaaat

SEQ ID NO: 7022 - DNA, 257 bp, Homo sapiens; identical to SEQ ID NO: 6640
  misc_feature (1)..(257): n=a,t,g or c

SEQ ID NO: 7023 - DNA, 434 bp, Homo sapiens; identical to SEQ ID NO: 928
  misc_feature (1)..(434): n=a,t,g or c

SEQ ID NO: 7024 - DNA, 313 bp, Homo sapiens; identical to SEQ ID NO: 4684
  misc_feature (1)..(313): n=a,t,g or c

SEQ ID NO: 7025 - DNA, 392 bp, Homo sapiens
  misc_feature (1)..(392): n=a,t,g or c
ttattttttttttttttttttttttttttttttaaatatgaaattttactcgacaacagaaaaggagaaacaggaaaaaaggtgcctcgagcaaagtcaatgacttggtggtggcagagattgtttcctccaaaacgagaatggtagtaactagggcaaatttcacaggcctaccaccaatctcaccagtccaggaattatataggaatggtcacattcctaatgatggtgaagcagaaagccctccccacagagagacagcccactggggacccagctcaagctcttcaaaacgtggcagctacaggtcacaagactttggcagagatgtccgaaattcttcaaggaaggcgtcacgatcagagggacggatccagctcaaatagctttct

SEQ ID NO: 7026 - DNA, 272 bp, Homo sapiens; identical to SEQ ID NO: 6641
  misc_feature (1)..(272): n=a,t,g or c

SEQ ID NO: 7027 - DNA, 421 bp, Homo sapiens
  misc_feature (1)..(421): n=a,t,g or c
tttttttactttgtaacaaaaatttattaggattaagtcaaattagaaaacttcatgctccaccacttgtcatatttacctgaaatgacaaagttatacttagcttgagtgtaaaacttgtgccccagagattctgtttggaaagcaaaaaaataattgatgcacatagcagtgtgcctgataccaccacagtgaatgttgtttaaggcctaacaaacagtggtcagcaaagcatacattacttttaagctttgggtccaaggaagatgtcattccctacctccttcaaaagcagactcatcatagcctgggcacctaggcctggagcctattttttcgagtctaatatgaacatctggatttcaagaggtgctaggcttgaggtatctttatggcttaaaaggcacaggtcatgcagctg

SEQ ID NO: 7028 - DNA, 284 bp, Homo sapiens; identical to SEQ ID NO: 3605
  misc_feature (1)..(284): n=a,t,g or c

SEQ ID NO: 7029 - DNA, 405 bp, Homo sapiens; identical to SEQ ID NO: 2521
  misc_feature (1)..(405): n=a,t,g or c

SEQ ID NO: 7030 - DNA, 389 bp, Homo sapiens
  misc_feature (1)..(389): n=a,t,g or c
tttttttctttataactttaacaaatgttattaaaagcagcaattaaaaaccatgaatctttttgaaggtgcagagggttataaggtcagttggcagtaatgcagctattatctggtatgaatgaaatgctggggtggggagtcagggtgacctcattaggccttgtgctatcttcccaggtggtgcagacaccccctccctccttttccctctccaggcccacagcctccccagagcccaggtagggaaggtccagatgtactgtaacaggattgctcatcccaggctatctcagaagtctggaaagcaggcctagaaggttgctgggctctctgaagccaggcaggaagctacaaattggatcccagttcccacagcacccctgggc

SEQ ID NO: 7031 - DNA, 375 bp, Homo sapiens
  misc_feature (1)..(375): n=a,t,g or c
agtcagaatcagactttatttaacaatctgaaaatgggttcttccggctttaagtcttgcaaaatgggtcgtaagtcaaagacagatttgttcactatcctctgagtgtgtgtggttatttctctgtataggcaagtgtctgggtctatagatacttttgctttttatagtgattaaagctccactttagttaatgtataaagtcttattctaataatgctaaaaccagaattaaatattccctgagtctaatgttctctgctccccagcctgcctccctccatccctcccgtaaggctgctcctccgcctccattaatgccaggtctttagacagcaccagcattcctactgagaacccagggatggatgctgg

SEQ ID NO: 7032 - DNA, 354 bp, Homo sapiens
  misc_feature (1)..(354): n=a,t,g or c
tttagaaaacaatttttatttaaaaaatcataaaaagtactggaatgaaaatacaggtaaagcatttgaaaattatttttctggcttagactgtttactggctcgattctagctctgtcctggtaaaggcctccagaaccttcacctactattatcaagtctggcctcatacggagggacttttactgtactgaaaggaagccagctgaagccgagatctgaagcgctcagcttccagttcccggaagaaaacatcatcatcattctgtgttatcatgtcctgcagctgctgaatttccttctccatcttagatctcagctccctcttcaccttatgtaatgtctgggcctgag

SEQ ID NO: 7033 - DNA, 340 bp, Homo sapiens
  misc_feature (1)..(340): n=a,t,g or c
tttaccaataaagtgatttgtatataactggcggcctggcgaggggggcggttggagactgaattgcccattcaaatcattagactttttaaaaaaacatttcctcgatggaaatttccagttccacaaaagaaagtaatcaaacagatgttcctccttaactcttaaaccacgacattcagatgatctatgtgcaaattaataaggttatgacataattcaattatgtgacaaagccgagggagagttgacaaagaaccagactggcatcattgacttctcaatgaagtggagctcggtaaaaaatctagatgaatcacaggttgtctgaccagaagat

SEQ ID NO: 7034 - DNA, 438 bp, Homo sapiens
  misc_feature (1)..(438): n=a,t,g or c
tttttttttttttttttttttttagagaagctcaggtgtcatttttattctatggttttaaaatgaaataatcttggttagtcacttacaactttgacgactttaaccacctgatgaaacctaccagtttctgcagcctcaggtctccataagggtcttcttaaattggctcctcctcatttcaccaccagcttttggggcccaaggtcctaaggttgtgttcttgaagccaagttcccacattaatccatgttaaccacatgtggttaaacccctgtttaccatatacagatctatcaggcttggtgctacagagatgaggaagacagtccaggcctcccgggggcttagagcttgggggtgagagtgggggtggcagacgttaacaaaatctcccatgcagtgtgatcagcattggcactgcgctgctgtcaccaa

SEQ ID NO: 7035 - DNA, 447 bp, Homo sapiens
  misc_feature (1)..(447): n=a,t,g or c
ttttaacatattaccacatccaacttctttattcttgagaaaacaaaaaagtccaaaatcaaaggaaagcacccgttttaaaccctcatatctttctcagggctcactgcagtctggccatatctcaagcaggtctgtccaatggcttggaacatagacttttgcagtgaaactttaaaaacattacttgaattaggattacacaaaaaaaactaaattctaagtgagcacaactatcgctgagaccctgaaatttcaggaaataaacatggttcaaaactcaaactgttcatcaaaataattacgcaggtcagccaccactgcagaaccatcactgctcagaggaattgagtccgcaatgactgatctcatcatctcttcattagcacataagcggttcaacttgggatacgcaaggagtctctgcagaggtacgaaaaatttatc

SEQ ID NO: 7036 - DNA, 367 bp, Homo sapiens; identical to SEQ ID NO: 6644
  misc_feature (1)..(367): n=a,t,g or c

SEQ ID NO: 7037 - DNA, 394 bp, Homo sapiens
  misc_feature (1)..(394): n=a,t,g or c
ttttttttttttttttttttgtttgctggataattttttaataaagtgaggtttacatcactgatatttaataatggctatatgcacaaaagaaaacacacctttttggttaaggggtgaggaagttagagaaagcatgagaaacagggagcatgtggggtgaggcggggcaggagtggaaggctgcaggacccccagctcactccctgcctgcggacacccatgacactacagatcaaggggttatgaatgacatggattcagatttctttcattctagacttcaacctagccttaaccttttgtttcagcaccagtctaacagagcagcgcaggcgtttctcatccagcagcaatgctacttcctcacccagggcaggtgcatgggctgacc

SEQ ID NO: 7038 - DNA, 408 bp, Homo sapiens
  misc_feature (1)..(408): n=a,t,g or c
aggtttgtccgtaaggcttttattataaagaagattccagagtcccagctgcccccctccagcccccatgggctctgagccagtcccaacactggctgagttggctgcgaggggcccgcatggcccatcggccgacagagggtcgtttctggcaggaacggagtgtgtggtagtctcaggcgccaggggtgcgtgccaggtctgcccgctctctggaacagtcatttccagtgttgcatggggagcctctcgggacccctccccgggtcctctgcgcaagcggcagctattcacagttggtgcatgatacgttttttaatatataaaagctttaaaaaaaaaagtggtgctatctttagaaacactttcagcaagatcaagtagcccagctacagcctcggtgcatct

SEQ ID NO: 7039 - DNA, 318 bp, Homo sapiens; identical to SEQ ID NO: 5657
  misc_feature (1)..(318): n=a,t,g or c

SEQ ID NO: 7040 - DNA, 408 bp, Homo sapiens; identical to SEQ ID NO: 1145
  misc_feature (1)..(408): n=a,t,g or c

SEQ ID NO: 7041 - DNA, 295 bp, Homo sapiens; identical to SEQ ID NO: 1542
  misc_feature (1)..(295): n=a,t,g or c

SEQ ID NO: 7042 - DNA, 559 bp, Homo sapiens
  misc_feature (1)..(559): n=a,t,g or c
tttttttttcaaattttaaatttttattaaaaatcacagtttttaaaaatgtccagtgacacaatgtagctcttctgaaatgaatggaaaacacaacacactgctaaccagtggagggagctctctgcagggctgggagacctgacaatgcagctgtagcctctgcaagtgaaaatccaggccgacttgcagtcattggactgatgtccaagtgcaatcaccatacagcagctacaggcagggctggctgatagggagtatgggagaaggacacgctcagatgaaaacatgcatgcaacgattttcaccactgaacacactgttttctgtgatagaaactgtcggccctgctgggggacaagatattcacggcctcactagccagtgtgatgccaccagggcagcctgcccctgatgctcctttgttacctgctaaagaaggaccataaggtaaaaggcaccttaccttatggagtgagcccagacccagggaaaagcttgggtagaacaatcaaggggcagcctgggtatgagattcagccaagctagctgctctagg

SEQ ID NO: 7043 - DNA, 538 bp, Homo sapiens; identical to SEQ ID NO: 5278
  misc_feature (1)..(538): n=a,t,g or c

SEQ ID NO: 7044 - DNA, 424 bp, Homo sapiens
  misc_feature (1)..(424): n=a,t,g or c
tcattaaaaaatttattttcatataaaagtgccaaaatatccaccaatgtcataatctatctcaataaccagtttacactagtaatcaaaacacaagcctctttattcacattgtttaaaaatccaattattttcacacattcccacagtaactcgagtctctagacagtgggaaatttgcattcctattcgctgtggtagtccatatgtccaggttcatataggcgcgaaacgggttgaaccccgggtagtattccttgcacacgaccgcttggttttccatgtgggtcgaatgttccgtggtggggttgatggggcagcaattttcatacacatcgctttgcgnggcccagatggaaccaaaaagtccagacattggagacaagcttcgggtgcttgtgaggtagggcggagagctgatgaa

SEQ ID NO: 7045 - DNA, 516 bp, Homo sapiens
  misc_feature (1)..(516): n=a,t,g or c
ttttaatggtgcacaagctcattttaacaatataaacaatagaatgacagtgagatgcgtttcagcaaggccagtatcacagaagccattctgtattttggtttttgtagcagctgtgtaggtaggctaccagctccttacttccagtaagtggatgtctccattaatttccagcgtgtcaatactgctgagctctttaaatctgtgtttgtactccaggctgtgtacgccatttactgcaaccttgaattctctaacatcacagtaaattatcatctcaaagtacatcccaggactaaatgggaaagaggtaatatttctctcttcttctccccaggactcctgaagaaaagaatttcttacaaatgctttaatattcaggcgtgggttcaagtgtagagcaatatcctttgattttcctgctagtaggtcaacattaaagcttttggcatttgcattcactgctcctttaacgaggacagttcgtccaggggccatgggggtgtttcaccttgc

SEQ ID NO: 7046 - DNA, 498 bp, Homo sapiens; identical to SEQ ID NO: 2530
  misc_feature (1)..(498): n=a,t,g or c

SEQ ID NO: 7047 - DNA, 355 bp, Homo sapiens
  misc_feature (1)..(355): n=a,t,g or c
tttcttgtaaattttttctttatttaaacttcaataaaaatatagatttgtaactcaatagaaagacagcagtgataataactcacacatgagcagctcgcaaatttcaaagtctttggtcttcaagtcctatgtcacagcttcctcagtctgattccctccttctctgtagaattctgagaactagtttggttcacttaatcatctcaatggagatgggcctttcctgccattcactcaaatctagaactcccaatatgtggctcacaaatacttcagtcatctacaaaagcatctggaaattagataattttagccagagtcagggacataaaacttctttaaagggatgcag

SEQ ID NO: 7048 - DNA, 410 bp, Homo sapiens
  misc_feature (1)..(410): n=a,t,g or c
gagtttttgttatgtttattgccacygggagaatttgatttaagacatcagaaaattgcattatatttyccgbgtaacatggatactttaaacaatatttygttcattcatttgcttgttcattcaactaaacgtattgaatagctcctccatgcaagcacctctctggccctgggggtgcagcggggtatgaagcagagaccctctgtccatggrgccacattctgccgggacccacagtccgtgagcgtggaggcaggagcactgggaacagctagctggctggggccttctcaatagggaatgtcttaggcagtatttganggatacctatgggtatagagaacatactgggaaaaggaaagacagtatttttyttagaacttgaagaatttctgtaawttkttttt

SEQ ID NO: 7049 - DNA, 323 bp, Homo sapiens; identical to SEQ ID NO: 3608
  misc_feature (1)..(323): n=a,t,g or c

SEQ ID NO: 7050 - DNA, 335 bp, Homo sapiens
  misc_feature (1)..(335): n=a,t,g or c
ttttttttttgcccaaatgaccaatttattagaggctttgcagagatcaggacactctcaaagcttttctgatatgtcctgaggactctgggcctgagtctactttttaaagccattctggaagagaaaaaaattcagatgcttcataatactaaactttttggaggctcgtgtattctgtggagccccatttgggttcccagggtgcctcctggccctggggactctctgtcttagggaagggtggccccagtacagcagtgaccttgcagctgaagatccctctgtgaagcagtgtgatctccgatggctgtcctcccctgcacgagggatca

SEQ ID NO: 7051 - DNA, 450 bp, Homo sapiens
  misc_feature (1)..(450): n=a,t,g or c
gagaagtagtttttttatgtccattattgtagagaaattgagtaccttgcccaaggtcacacaggtcacatagtaataagaaccgagattcaaagctctaaaatcagtagtcttcaccatggcaccacactgcttcaaactgaagggtaggttgagctgtgactagaaagacacaagcatggctacatatctggagttgtcaactctggattttttagttggaattgggtcacctataattatctgtattcatctataattctgaaactaaattagatgggctgttttgattcttacacttttagacagtgggtaggattattataaattattcaggtatacaagatcttgtataatcaaattactctttttgttaacccaaaattttttaagntggcnttcttaatgagngcagcagnccaanttgggtggggaacntaaagnacctta

SEQ ID NO: 7052 - DNA, 341 bp, Homo sapiens
  misc_feature (1)..(341): n=a,t,g or c
ngcatttattgctagaaaggagaagaaaaacaactttgttccctggnagctaatatcttgccagatattttggcaaggtactttaacattattcttaaatagaaatgcccaaacatatttttcattgatttcacatgaaaaatacggcaacactttcaaatctgcacacgtgcatgaaaacttcttataatgatgttgttctatttcacttggntccctgtttatcaacacttgtaattctcctgttaggatattctctctatatatcttctccctcattttatgtttttatcctttgggnttccaaaggggctttatcntggtttcncccttccaaaacc

SEQ ID NO: 7053 - DNA, 459 bp, Homo sapiens; identical to SEQ ID NO: 6275
  misc_feature (1)..(459): n=a,t,g or c

SEQ ID NO: 7054 - DNA, 402 bp, Homo sapiens
  misc_feature (1)..(402): n=a,t,g or c
acactggggagctttaatggcctgttacagggtggcagaaacagtggctgggtctgggagtcacagcaaaatcaggcgcccagaaccatggtggaaggtggggttgctagttcatgaaaacttgaaggacattaggaagaggcggcatttgatgctgtcaagtaactacacacagaacaagggcatgataaaagtcctaatgcacatagagaacaaagccctgctcagaaatgctgtcctcaccagcagaaaggactctgtggagaaagctgtcccttacataaaaaaagaagaacatactgggttagcacttgatatccaagaagtgaaaatggtcgtttttcgaagntttaacagttttgctttcaccaaattcccttttgaggttaggttaagagggca

SEQ ID NO: 7055 - DNA, 409 bp, Homo sapiens
  misc_feature (1)..(409): n=a,t,g or c
gccagcttaaaaaagtttaattgctgaaaacatccaaggcaggtgcgggccagtccctgcggggctcacaccccccttattggaccatcagctctgtgatgcccccttctcctggctacaaacctgggaagtagggcagctggtcccagggccctgagactnggtgctgctctagaaggcctggtggggggccagccccaanggcccttgaccagaactggaacagcaggcaagatggggcagcgtggggtgaccaaagatcctggatgaggccaatccaggctgggaccagcccaggtcagcagtnagaccaggggagacagggtncccagggccttgcccaggggacattgcttgctganccccctgccacccttgcacccccttggggcnacatgctaaacggggc

SEQ ID NO: 7056 - DNA, 451 bp, Homo sapiens
  misc_feature (1)..(451): n=a,t,g or c
ttaaattcaaaaatgcctagggtttattggaatagtcagggtttatcagaaatcatccaatataagcatcggacatggggaaaacgacaaaaccaaaactggaactaattaacaccttgaaaatagaaatacattcctgtgggaggagaattctatgcctttgtcactagattagaactggggcaaagaatctgaacaacttgtgtaaggcctaaggtgtcttgtgagatccaaatccttattaaaatataggcagcattctagctgctaatttaggtaacaaagaaaatcaggttaaaagtagcagagaacattattccattttttttttctccgtaacctagagcaggggttagaaaactttttctgtaaagggccacacaggacatattttaggctttgcagaccagccagtctctgttgcaactattcacctctgtcatccnaatgt

SEQ ID NO: 7057 - DNA, 460 bp, Homo sapiens
  misc_feature (1)..(460): n=a,t,g or c
tttttttttttttttttttttttttttttttttttggtctccatatacatttattttgtgtagacaacaatgacttttcaccatttcctttcctgnggttccatggttctcaaaatggtaatttcatttatacatagcaaaaagttcacaaaacctttcagcactgttcacattttcacatttgtttaggaaacaatttgtttaggaatacagctagctgattttcttctgatttcttccacttttggaatcccacataataataangttaaagtataccaagaagaacaggaagttcaagcaagatacaaaacacaccaatacagnaaacaagtccggtagtttctgaggaggatccagtgtgacagtcatncaacgtcagaagcaccatagggatgactggggataggaaaccaattattgntataattcngggaaagaaaggtaaaacntggaagat

SEQ ID NO: 7058 - DNA, 216 bp, Homo sapiens
  misc_feature (1)..(216): n=a,t,g or c
gtttaaataagtttttacttctccctcaataagatatttgaaactgtttttatatttcatattaaaaataaacctaagagtccagagaaacttgccaccagttctggagccatgagcaattctctcctccctctggcctcagtttccttgtctcgtgagatggggagaatctttgatcttgatctttagtgggtcccccctccatggcccccaggt

SEQ ID NO: 7059 - DNA, 465 bp, Homo sapiens
  misc_feature (1)..(465): n=a,t,g or c
ttttctgtacaatacacatttattgagcactagatatatgccatgctagatgcaggtgacccagagcatcaaggagcaatagtctggtggcagagacacacacaatgtcactgtgatgtattaaagcagtcagcaagagatgcagctcagggcactgtggggatatccagaggcacagtaccttctgcctgtcagtcagggagggagaggagcacaggctgaaggagactggaagacagcagttggcctctgatagtgggactggagagagatttctaagggccacttcttgttttcagggactaggttgggctagatatggggctcaggatggacaaggcttagagccaggttggagaagatgaaagagcattactagaggaatggggaagcctaggctatgccctttactctgccattgactgcgtgatcttgggcaggccatgtaacctctcagggctgtgc

SEQ ID NO: 7060 - DNA, 252 bp, Homo sapiens; identical to SEQ ID NO: 1026
  misc_feature (1)..(252): n=a,t,g or c

SEQ ID NO: 7061 - DNA, 440 bp, Homo sapiens; identical to SEQ ID NO: 3269
  misc_feature (1)..(440): n=a,t,g or c

SEQ ID NO: 7062 - DNA, 330 bp, Homo sapiens; identical to SEQ ID NO: 2176
  misc_feature (1)..(330): n=a,t,g or c

SEQ ID NO: 7063 - DNA, 362 bp, Homo sapiens
  misc_feature (1)..(362): n=a,t,g or c
tttttttttttttttttttttttaacggtagaaccaangtttattaatgacagcctttattacaatcactctcaagtgtaaaaaataaagggtgattaattaatatttaaaactcactcggacttgctgtttggcctttcagtggatgtgccaaagggaagggatcttgcctgattctgaatcaattggccagatggagttcactggagaatgaggcaatcaacaaaaaagacaaatgatgccaactggagagagctcgtgtcttctccatgttggaaggacattacaaaatggcaactntgggtgggggcagagatgaagtaagacaaccttacagtcggagtaagatgtgaatacccttt

SEQ ID NO: 7064 - DNA, 418 bp, Homo sapiens
  misc_feature (1)..(418): n=a,t,g or c
attatttttcctntttatttctttaaataaagtctcttataaatttatttccccaacaattttgtcattaggatagcattggctttcacctagataacaagatttttcagcacaaatataaagttttctgtaagtagcatccagtagttagtcctacgctgaatccaaaacctcttattttgcatgtcattctttcccagtcttcagttgcacagcgggaagagggaaaaggggtgggaaggaggcagagggaaggagaggggtgctattttatcaggggacaatgaggaattcaacatgggctggggggagggcctcagggaaacttacaatcatggggcaggaaggccgaaggggggnaggaaagggcacccttctttcaccaagggcttccagggngggggggnatccatcttta

SEQ ID NO: 7065 - DNA, 220 bp, Homo sapiens; identical to SEQ ID NO: 5694
  misc_feature (1)..(220): n=a,t,g or c

SEQ ID NO: 7066 - DNA, 560 bp, Homo sapiens; identical to SEQ ID NO: 1764
  misc_feature (1)..(560): n=a,t,g or c

SEQ ID NO: 7067 - DNA, 414 bp, Homo sapiens
  misc_feature (1)..(414): n=a,t,g or c
ttttttttttttaattgataaaaattcattttttatttgaaaagtgtgcagaaacaatcactgaatacaattctcaaccatagtattcatatgccagacaccaaaaaatcattggatgctatgatttctgaagccactagaactttggtacaacaaaataatgacctaacagtgtgcgtcaggaaccacagtctattaaggggcatatagaataaaaacttcaagtttatagttttaagttacattcatagcactagacaaaacagatctatataggagacagacaaantaatcaaacgtgcttagcctaaaattanagttaatattacttgaagggtaaactgttgggggntaccantgaaggcacttcaggtgtttattatttgggaccatncgtccttaccttttttnacc

SEQ ID NO: 7068 - DNA, 266 bp, Homo sapiens
  misc_feature (1)..(266): n=a,t,g or c
caatcctcaattacctgcgggatgggtctgtgccactgccggagagtacgagagaactnggggagctgctgggcgaagacgctactacctgggtgcagggcctgattgaggactgccagctggcgctgcagtccagggcatactccggtttctccagttgttccagaaatgtgtttttacagctggttcatcaaaccagggtccagtctagatcttcacgttgcatctggttatctgcaagttaacaatggaaagcatgacttttt

SEQ ID NO: 7069 - DNA, 381 bp, Homo sapiens
  misc_feature (1)..(381): n=a,t,g or c
gatttgaattttngtactttattattagttatacagtaaatgtgataaacaagtttaccctgtgtgatacaaaaaataaaaaactgcagcatgaccataattttttctttatagataaggggctctcatgcttaaagtctgattaacatagccacatctgatttcaaaatatagatatgcccaatgaggtagttcttcacaatggggaatcgctggttaggtgttggttacccaatttcttttatttaaagtttaatgggatatttgatgccatataggacaaaacatttgggaagggagtttcaaattcccatctgggaggatagggggtcctattaaaacagccctaaaaaaaaatagggntggggtttaaagggcntt

SEQ ID NO: 7070 - DNA, 463 bp, Homo sapiens
  misc_feature (1)..(463): n=a,t,g or c
caatgttntttattttaaaatgatgaggtttaattaatttaattaacagaaatgtattgagtacctaggctcctgtctttaccgtagccaaggcagtagttggttcaagattacttctcaaccattagcatgtttccagggagcgctgcttctacagagacagatttaatttttacatgtgatggggaatgaaatatcctgtacctccctcctggcttgatttagcgataagctgctttataaccaaatctttccaaatgcctactgtaaagtcaggctttcctgactactgcattaggattcactacctgcctgtgttgccctgaaatgtctctgaccaccaggcagggtgtcagcagccggctaggagggggcagcagtgaggtgacttctggaacctgggagtgagctttcccgctctatttaatgggccaggggtcatgcatttattctctggctgata

SEQ ID NO: 7071 - DNA, 266 bp, Homo sapiens; identical to SEQ ID NO: 2550
  misc_feature (1)..(266): n=a,t,g or c

SEQ ID NO: 7072 - DNA, 333 bp, Homo sapiens
  misc_feature (1)..(333): n=a,t,g or c
taatntnactacagtcactgtttaatcatcttttgaaaaactgttaagaactagagatgtaatgaaaataagacttagtttccactctcaaggagactgaagttttagggagcaggggaacatagaaaatagatcatcataaaactaggtgatggaagtatgttgcagagtattcctggnaaaacagacaatacagcaaaatcttggaagataagcaacattaggtcagnttaaaggtagagtggtggatgccctgttcacaacacagcctgtgagnaaagcatggcaggagaagagtntgagccagggcttattcgaccanaggggtggcct

SEQ ID NO: 7073 - DNA, 412 bp, Homo sapiens
  misc_feature (1)..(412): n=a,t,g or c
gtggaatataggaaggactgcagtagatgctgtcactgctagggaatatccccaccaagttccatcattctcaaatgattttcaaaattttttcgccatgtccatgccctacctgcaatatcacatgcctaacatttttaaacagattcattagtttnaattacatttatttaaaaatgttttaattacagtcataaatgaaactcagggagaccanttacacataggtaaccataaaacgaantacaacaggantcaatataacgtaactggaaggactaaccagatatatttnctgcggaaggctgantttgaggtcnggttatttccttttttaagggggggngggccggtntttgggtggggnattttcctggttaccacngggggcttggcccccttggtggggttc

SEQ ID NO: 7074 - DNA, 396 bp, Homo sapiens
  misc_feature (1)..(396): n=a,t,g or c
aaaggtcacatgaatgtttattacaacatagaaaagagggaaaggaagaaaaaggtttccaaagccgtatttccaaggatttaaaaaaacacaaacttggaatgccaaagagatgtcatgctttatatatttataataggaaggtgtgtgtatgtataaatatgtacatggaaatatgtacacaggttttgactgtcatatatagtatttttcattgcatgtacagtaatgctgcttgagtgaagggttttaaagctggcagaaggctggagaatctggaaccctgcttggcccctagagggcgctgtggagaccacctaagcagctcccagggaagggtctgccggggctggggctgggtcctgagggtgttggggaaggctgagctgcaggcgg

SEQ ID NO: 7075 - DNA, 312 bp, Homo sapiens
  misc_feature (1)..(312): n=a,t,g or c
tttattgtaaagaaggtgcagtcggaacatgggacactgaaaatacacaatctctggtctttcaggagagggagagagtgatatatacaaaaattgtaaacatgttcacttaaatatccacacagaattggtctaggctacaatgtaacaaggttgtcactcaactgcatctcccgagggaggtgtctgtctgatgaaatgtggcaaccccggttggggttgacttaatgtgaaaagcccgctttgagcaatgcatgagtagtcagctttgcagggggctccaacctggggcctggcccgggagcagggtgc

SEQ ID NO: 7076 - DNA, 505 bp, Homo sapiens; identical to SEQ ID NO: 4033
  misc_feature (1)..(505): n=a,t,g or c

SEQ ID NO: 7077 - DNA, 533 bp, Homo sapiens
  misc_feature (1)..(533): n=a,t,g or c
cactttttttttcagtttaatccttggatttcgtttggcttatatgttaaaaatcctcaaaagaaaggaaactaagccagaaaccttttaaggaggactccctttcaggacctcctacctattttgtttacattattaataacaagcaatagttcatatcaaagaattgtggatagcacaaatccaaaattgatttccttttccaccaaagaccacattttgctctatatgtgaggcatcatctgttgtttcagggaggctgggtacatcttatatctaggtatacccttatggtattttatggtatttncctaaataaaatttaatgacttgggcaggcattttctaggtcagggaatttcccatccatatggtccttcaggnggggcctataaggggtcccaaattttaaatgtggcctttgtcngtgggggggnaaaattccaggggtatggggcccnaaatacccccntaatcccttttaattcnccccaggggatttccggggccttnggggcccagncggggggccn

SEQ ID NO: 7078 - DNA, 388 bp, Homo sapiens
  misc_feature (1)..(388): n=a,t,g or c
acatgacaacatgtactttattacatggatcagaaataccacatgtactaatagttgctgtacaatgatacacaacacccaactaagactatttaaaggttttgctgatattgaaaactataaagacacaatgtgagagtaagaaagtgtttcataagatagcataatgccaagacaattcatcgctttaggntattaaatacattccgcatattaaaaacttaatgtattataaagctatgcccattctttaaatgaaaacttgaaggnctttactccnattcatttttctttacagggnctattgcagtaccattcattgtttaaagcnggatgtttataaccatttttccatactttaaagtggggacttaatggggacggaata

SEQ ID NO: 7079 - DNA, 361 bp, Homo sapiens; identical to SEQ ID NO: 2559
  misc_feature (1)..(361): n=a,t,g or c

SEQ ID NO: 7080 - DNA, 242 bp, Homo sapiens
  misc_feature (1)..(242): n=a,t,g or c
tatggttattcaatatattcatttatttgacaattatttattcatttgacaattattcaatgtttactgcataagcaaaaaactgaataagacggttttctgcttttataaaacttacagttaagtagaagggacactgcataagaagtaacatgggagaaggctcaagtgttgacaactgtgatgaagagagatggaggnccngaaggaaattcaactgtggccgagaggcaactaaaagg

SEQ ID NO: 7081 - DNA, 326 bp, Homo sapiens; identical to SEQ ID NO: 1803
  misc_feature (1)..(326): n=a,t,g or c

SEQ ID NO: 7082 - DNA, 248 bp, Homo sapiens; identical to SEQ ID NO: 4442
  misc_feature (1)..(248): n=a,t,g or c

SEQ ID NO: 7083 - DNA, 180 bp, Homo sapiens
  misc_feature (1)..(180): n=a,t,g or c
atgatgtttaatgacacagatcttcccaaagtaatccaaaccccaaaacatcacaaaattattcatactattatacactccaaaagcaaaatacttcaactgcaatccttgccccagcatgnttcctcaaaattgngatanctccntgngaaacaaangtaaaaataataataatttaag

SEQ ID NO: 7084 - DNA, 265 bp, Homo sapiens; identical to SEQ ID NO: 3627
  misc_feature (1)..(265): n=a,t,g or c

SEQ ID NO: 7085 - DNA, 431 bp, Homo sapiens; identical to SEQ ID NO: 335
  misc_feature (1)..(431): n=a,t,g or c

SEQ ID NO: 7086 - DNA, 166 bp, Homo sapiens
  misc_feature (1)..(166): n=a,t,g or c
ttttttttaaacagctctcagggactttaataattacagtctgtaacaaataagcagtgaatgtttgaatttggttggtggaaagctgggatgcaagtcatctctgcctattacgacaaaagcctatcgaccccagcagccagcacaggcaggctgcagctgaagc

SEQ ID NO: 7087 - DNA, 468 bp, Homo sapiens; identical to SEQ ID NO: 4759
  misc_feature (1)..(468): n=a,t,g or c

SEQ ID NO: 7088 - DNA, 455 bp, Homo sapiens; identical to SEQ ID NO: 1816
  misc_feature (1)..(455): n=a,t,g or c

SEQ ID NO: 7089 - DNA, 411 bp, Homo sapiens
  misc_feature (1)..(411): n=a,t,g or c
acagaggttcagctattattgaaacttgtaatttctaaacttaaattggggcaagtggctagagtgcagagtaatgccatcactgcccactgggaatgcagaccgaataattaatagccacccctcagacggaggaccaggtgcagggtcgactctttctggatgttgtaatcagagagagtgcggccatcttctagctgcttgccggcaaagatcagcctctgctggtcaggggggatgccctctttatcctggatcttggccttcacattctcgatggtgtcactgggctccacctccaaggtgatggtcttgccggtcagggtcttcacgaagatctgcatgccacctctcaggcgaaggaccaggtgcagggttgactccttctggatgttgtaatcagagagggtg

SEQ ID NO: 7090 - DNA, 480 bp, Homo sapiens
  misc_feature (1)..(480): n=a,t,g or c
caccagtaactgtgtcttttattttattttattttatttttatttttttattatttttttaaatctcttggccccttcaggcctacatagggttaaagctccccactgttgcaaacctcaggatgtctcacaatctcttgttgttttatgtagtcctgaacatatctttttaaagagtcgcttcattaaactcttctaaattacctgattctttcctgctggaacccagactgacacataaggtcatgcttttcaacatacagccgtgcaaaacattgaaggaaaggtagcacctggaatactttctataagcagaaagcagcagttgagccagaagnttgaagactctctcccaaagcactccacttcaaactcttttgtcatttggagcttgggtaactcacatnggagggcaaagtgagggactctaatcttctcagtatttggcatnccaactgacctttcattcangtaaatgtt

SEQ ID NO: 7091 - DNA, 279 bp, Homo sapiens; identical to SEQ ID NO: 2582
  misc_feature (1)..(279): n=a,t,g or c

SEQ ID NO: 7092 - DNA, 317 bp, Homo sapiens
  misc_feature (1)..(317): n=a,t,g or c
ctggtttccttctcggtttattctgttagaatgaaatggttcccataaataaggggcatgagcnttcctcacgaccatggtccatgacaaggggcagggcagagggggcctggatgggagtccttgtgggggaccaggcaggggacttggatcaacaagcaccagacgagtggcgggggcaggcgagaggctcagtgggacctccaccctcgttgccccagctggtggctgaccaggtggctgtggagggtcaggagctgccccggatcctctccatgtagttgcnaantcctcagggtccttnagccccatgtcct

SEQ ID NO: 7093 - DNA, 514 bp, Homo sapiens
  misc_feature (1)..(514): n=a,t,g or c
agagagggggtttcccatgttggccaggctggtctcgaactcctggcctcaagtgatctgctcatctcagcctctganagtgctgggattacaggtgtgagccaccacacctgcctttttcttttctttttgcnagttaaaaatatttattgctattccaggcttcaaatgagcccagaactcaggtctggtgtgtggttcagaagttgtcatggcataacagggtggcggacaaatccaggcagcctgaccttgagtccaccttatcttccttggacccctgctccacaaaagcagctgttggtggggccaactcttccacatctgcctcattcacccttacagagctccaagactggggcaggtggcctgctgatccccatagctcacagatgagangctgcccatacntctcctagcactgggaagggcctctccntaagattcagacacgatggatttggccttgttgagggagaagtgntgcanaggagtttgttttaanaggacaagg

SEQ ID NO: 7094 - DNA, 444 bp, Homo sapiens; identical to SEQ ID NO: 878
  misc_feature (1)..(444): n=a,t,g or c

SEQ ID NO: 7095 - DNA, 472 bp, Homo sapiens
  misc_feature (1)..(472): n=a,t,g or c
ttgtctttgcggaagggatttattgttccggagctgcagctgctcacagttatgacaggggtacactgcaggggcttgccaatttccgtggcgcctgctggagtccgcgtgtgtccgaagcacaaaaggggaaggcaagcaagaggcagtttgcttcgtgtcctcgatctccgtggagagccccttcccgcctgtaccgcctggcgtttgctgtcctaggtgtttgcttttgttcttatgtatagaaatcccagcctgtgnaagaggtctaatgttaacagaagcgttaaaatctatacacgaggtgggtgnggaggcaggggcaggcaccgaagcagacagacgactccatggcagaaggcatgcatcagacccgccgncccccacggccgccgnacccngggctgtgccccctgggaagggcttggggacattgggcggnaagggaacacagnagctggagcttggggtg

SEQ ID NO: 7096 - DNA, 156 bp, Homo sapiens
  misc_feature (1)..(156): n=a,t,g or c
ttttatgatgtaacagacatttattctcttttccttttacaaatcctcaggtaggtggcattatgtccaatttaaatgaggctaccagggctcagattaagaaatttgctgtcacatagctattagatggcggcacctggattcaaactgttcctc

SEQ ID NO: 7097 - DNA, 338 bp, Homo sapiens
  misc_feature (1)..(338): n=a,t,g or c
tttttactcatcaaaccatttgaatttaattgcattcttcaaaattctacagctacagattgcagcagagaataccagggactcagccagagaagaaagtactgtttttaaataaacagctcctggcagctctttattctagtccacattattcagatatcttcttttttcctctctttctttccatgtgtttgggaaaatttttccaggatgttttcagatgagtttgtgaacaatggccctagagtattctgtttttttccccttgaagcttctgtgacctgaagcatagattacttttatgcattggcttgttgctgagtttattcaatggtgcg

SEQ ID NO: 7098 - DNA, 349 bp, Homo sapiens; identical to SEQ ID NO: 3039
  misc_feature (1)..(349): n=a,t,g or c

SEQ ID NO: 7099 - DNA, 220 bp, Homo sapiens
  misc_feature (1)..(220): n=a,t,g or c
tacaggtgtggcaaaatacttattacaaagaaagcaactgcaaccctagagaggggtaagccttctctgggcaatagtcatggacatttacagaggggaaggaagtaaacgttaataaataattctgtaaataaatgctagtacatcataataacataccacttagacactaccatggctttacagcaggttttctctaattcactggaaccatgctatt

SEQ ID NO: 7100 - DNA, 400 bp, Homo sapiens
  misc_feature (1)..(400): n=a,t,g or c
atttacaaatgtactaaaatttttaaaggagagaaactttaacaaaaatcttgataattaaaaattcaaattgtgctagatagaatgtattccaaaatttctgctaaaaatttttgcttttagtttgtaagacataattcaggagaacctcaaagaaaaatttagcaattaagtttggaaaagctataaaagagacctttactttttgaacagacatttttccctttcccaaaatgtgtattattcaagaagcatatttataaatttcattaaagaaaatatcggccaggtgcggtggctcacacctaatcccagcactttgggaggctaaggtgggtggatcatgaggtcaggagttcaagtgatctgcctgcctcagcctcccaaagtgttgggatta

SEQ ID NO: 7101 - DNA, 233 bp, Homo sapiens; identical to SEQ ID NO: 4058
  misc_feature (1)..(233): n=a,t,g or c

SEQ ID NO: 7102 - DNA, 413 bp, Homo sapiens
  misc_feature (1)..(413): n=a,t,g or c
tacttttattagtctttttattcttcttttattgatcacctctgaagttcagtagcacactgcataattttttgcattagcatgctgttgtttctacctaaaatgaccggggtccttgccttctgcttcccatagagattgtcctgcaaaggaagtgtaagccattgtgttactaattcccagatttcccccacccagacattttcctaggagctggtctcagtcccatatccgcatttctcatccatggatgtccactcaaattaggtttcatcctggaccagtcattctaaatacagtgtgtgctacatggaaccccttgtttctaccccactctcaactctccctaatgctgagagacgtcccaccaaagaatgcatcatgagctccagccaccactgaacatttgtggc

SEQ ID NO: 7103 - DNA, 467 bp, Homo sapiens
  misc_feature (1)..(467): n=a,t,g or c
ttttaaaactaaaattggttttaataaaagttttggagtcatctaaatgagtaactatacacattcctcctctccagcaagtatacagaaatcttcccttactccaatttgacgctgcaaaatcatacatgcaccccaaactgatctgttattgaaatttctttttctggtctcacccattactttaacatatcagaggaattaacataacagcctagagaacagaaataagagataataggtgcttcagtaccacccaaattatctactaagaccacagtgtgggcaacagaatgcagattcatggtagtagttccttgaatgaaagagttcagacagaatcttccacaaacacaaatttttgcggtatctaaatcttggcagagatggaatggaatgatatgagagccatatggaatcctattatgtaatatggttcgtgcgaagattccataaagttaatggtg

SEQ ID NO: 7104 - DNA, 395 bp, Homo sapiens
  misc_feature (1)..(395): n=a,t,g or c
aactattattgttacagctttattcttggagttgattattaactaaatatttgttttgtgcatttacaacatggagttgctgctttaacactatttgaaagtgtacaaaaactgtcagtgataattcccataaatgtttcacaaaacagaattttagcatttatttaattataaaaatttcccatgattcttcaaaaagttctgtatcttttccattatttgctttacaaagtctagtagggtttccctgttgagaatgtttccatagtctccaaaaaaagaattttgtttcaaatcgtatagttcaaaacaaactcttctatagaagaggtgaatttccctggaagatggaaaaaagaacaatgcttggcatacagtagatattaaataaatat

SEQ ID NO: 7105 - DNA, 172 bp, Homo sapiens
  misc_feature (1)..(172): n=a,t,g or c
gatcaagacatactcatccagtatgaccggacctggctggtagctgaccctacgtcgctgcgagtccaaaaagttggaggccagtgccgcgctcgtaccagaaatcctaccgataagccatcgtgactnaaactcactngtataataaacagttttgagggatttaaagttc

SEQ ID NO: 7106 - DNA, 118 bp, Homo sapiens
  misc_feature (1)..(118): n=a,t,g or c
gatcccagcattttccatcgacttgtaattgtttctgctacctgacaatcatcgccttgagtactgggacaacctttgattactcattatatcctcaataaatatttgttgaactaaa

SEQ ID NO: 7107 - DNA, 405 bp, Homo sapiens
  misc_feature (1)..(405): n=a,t,g or c
agtacttctgcatcgcctgggttcagcttcgaggtgtcgtcgcgcctcctgctggcgcccagtacgcgcaacttcttctgccacccgctcaacctcatcgacattgtgtctgtgctgcccttctatctcacgctgctggctggtgtggcactgggcgaccagggcggcaaggagttcggccacctgggcaaggtggtgcaggtgttccgcctcatgcgcatcttccgcgtactcaagttggcgcgccattccaccgggctgcgctcgctgggagccacgctcaagcacagctaccgtgagtggggcatcttgctgctgtaccgggctgtggggtgtgtcagtgttctctggtgtggcctacacagctgaaaaggaggaggacgtggggtttnaacaccatcccag

SEQ ID NO: 7108 - DNA, 356 bp, Homo sapiens
  misc_feature (1)..(356): n=a,t,g or c
gtctttgctcactggatttttattaaacactgcaaatagaaaggtatgggtagaccttgcaccagctgcagccaaagagtggacttactcactggcttagttagcaccagtctcctccccaggtgctcttggcaaagccagtccccaaaggagcaggaggtatttcaagatgagggccagatcaggcactgaataaaaaggccaatggctggcaagaggtcaggatgtgtcagctccactgggaccctgggggctgcagtgaccgtctgcttgttctgtgctttgttttcggtttccccgtgcagctcggattgggaaaatgaaaccggagggaagccagatgaaaggggcaagta

SEQ ID NO: 7109 - DNA, 553 bp, Homo sapiens
  misc_feature (1)..(553): n=a,t,g or c
cagtgtcaggactagtatattttattttcagatgcaagcagcaactttggcatttcttatcacaaaaaaactatatgagaaagctggcaanccagtgaacttcctggccggagaggtttttccattaaaggtggcaaggtttgatcatccaccatctttagagttagaccattgagttggacagatttggaaagtaatccatgaggtcccaaaggtcttagaaggtatttatccacttgcttgttagaaaaaggatagggtaaccgcaagtacttggtgacgttatggaggtttatggcatacagagttaaatctccttctttataccttggattgtcagtgtttgtgcaatgaaggtatactccgaagcttccttctctttgaaccttgcacgcttgccattaacaccttgggcccaccaatttcttgaacagaagagatagccaataatcaggtaaanggatcgaagttttcatccactaaatggnagttcctgctccaaagaatacttgcctcatcaccacttctaatnccattcgggctgacagccaat

SEQ ID NO: 7110 - DNA, 496 bp, Homo sapiens
  misc_feature (1)..(496): n=a,t,g or c
acatttanttttattgtacatattcatggtggacaacatggtgctgtggtaaacatgtacactactgaaatgatggctgcaattaatatctccaacaccttccatggttcctttttgtatgtgtgtgtataagtgtgtgtgcatgggtgtgtttggataagtgtgtgtatgagtgtgtatgcatgtgtatgagtgtgtgtgtttgattatgtgtgtatgagtgtgtgtaaggtgtgtttttaattgtgtgtgagactgtgtgtatgtatgtatgtgtatgagggtgagtgtgtgtgtgtatgtgtgtgtatgagggtaagtatgtgtgtacgatgttagtgtgtgtgtatgtgtgtgtggtaggagcacctggagtcntctctcagcacacccgccacacacaacacctgactgtcaccngtagtccctgcactgtgcacnggactgctcggctccctctccnacacaaccgcaagcccctgacctcctcctcccc

SEQ ID NO: 7111 - DNA, 406 bp, Homo sapiens
  misc_feature (1)..(406): n=a,t,g or c
ttttttagcatatccaaaaatggtattgctttattttttaaaaatattttttcttttttgaaatatcaatcgaatcaattttattctcacaacaatcctgagtaaatatttttaaaaaatatattttttgaggaaacagattaaaagctttaaaaaatgtgattcactgaaaatcaaatagtgaatacatgatagagtcagcactaaaaaggcagatatatcaaagagagactgaaataagcaactcattttttgcatcgacttcgaaacacctctttaccatcagtgtttgtaataatcattcttgatctttatacttcacatttcttggtaatccaaatgcttcataaatnctcttacacatcctgaatctcttgcttcattcagcgagataattccgggggag

SEQ ID NO: 7112 - DNA, 368 bp, Homo sapiens; identical to SEQ ID NO: 215
  misc_feature (1)..(368): n=a,t,g or c

SEQ ID NO: 7113 - DNA, 416 bp, Homo sapiens
  misc_feature (1)..(416): n=a,t,g or c
gagacagagtttcgctctgtcgcccaggctggagtgcagtggcgtgatcttggctcactgcaacctccgccttctgggtttaagtgatcctcctgcgtcagctcccaagtacctgggattacaggtacatgccaccatgcccggctactctcctgaacacttaaaaaatattttattcataaggatatcagaggagaatattatccttatccataagcaaattatggataaaatatcagtattttatccattaggatatcaatgattatgatttgtaagatactacttcctcaaaattgaggatttttctgtcttgtgcattactcaggatatactaataaactaatcaataggattacttcaatatactaatcaactatccaaaaaggttgttccctaatggaaccacccttggn

SEQ ID NO: 7114 - DNA, 328 bp, Homo sapiens
  misc_feature (1)..(328): n=a,t,g or c
cagaagtcatgtgggcacttattgttttgagtgcngtgaatgtgtagtttgatggactgtgatgtgttaggttggtgcaagcgtgattgtggttttngtcattgaaagtaatggtaaaaactgcaattacatttgcacccacctaatagattttctgcaggtgtagggatggttactttcaggaagtttgtcctattgtggatgctgagcgagacaatggctgcctgttcccatacattccctgcttggccacagccangttttgtccaggatttctgttgtacacagtacagttgcagctggattatgtgattggtttgaaattaaa

SEQ ID NO: 7115 - DNA, 204 bp, Homo sapiens
  misc_feature (1)..(204): n=a,t,g or c
aacgtctctgncattttagtgtcatgttactgaaacttcccttccccagtggctcagttcagagccttctgtgtgaagtctttaaacaacggtgtttcagggtcctcaacagcaataagatgggacacctctcagggttctgcttgctcctatttcagtctcttctcactcaggngagtccatgcttcctactggttggcagtt

SEQ ID NO: 7116 - DNA, 496 bp, Homo sapiens; identical to SEQ ID NO: 9
  misc_feature (1)..(496): n=a,t,g or c

SEQ ID NO: 7117 - DNA, 417 bp, Homo sapiens
  misc_feature (1)..(417): n=a,t,g or c
ttacctgtctgaagtcacattttacattttgaggaagggtacaggtaagggaaaagggcgggggagaaggattaatcttgtcagaaaactaaggtcagtagaataaaatacaagaaattaagttgacaaaatgaaacataatgagaaaaatttttttggacaaaaacaattcaaaatcagacttggctaataataccagtctgacagattctgagaactaaggagagccaattgatgttattttgcccagagctaaatatacttttcttaaaagtatgacagtatctggttcctctgaccagccattataataatctttgcaatacactgaacatacacatggaatacagaagtctctatttaaggtcaccagttaactaacttaataggcaataacgctagctaacagtaagacat

SEQ ID NO: 7118 - DNA, 361 bp, Homo sapiens; identical to SEQ ID NO: 2675
  misc_feature (1)..(361): n=a,t,g or c

SEQ ID NO: 7119 - DNA, 412 bp, Homo sapiens
  misc_feature (1)..(412): n=a,t,g or c
cacagtctgggggcccccgaagccccctcatctttattccagttcctcagatgtggcagttcccccagcttccctggaaacaagtatcagacaaaggtggtggcagacacaggacagggccctgggtggggcttgctggcgctaaaaggatttctcagcaggctcagggtctcccgccccgaatgacccttctggccacttcaagctactcctctgctgcccggcttccctctgcctctggttcccctggctgagcagggccttcctgggcttgaccctggcccccttcagcagttgtctcagactgttcccgaatgtccctggggctggctttgaccccagcatccccatctccctggcacccttgctcctcccctctgcttcttgcctctgactgcccactgcccttctc

SEQ ID NO: 7120 - DNA, 170 bp, Homo sapiens
  misc_feature (1)..(170): n=a,t,g or c
gtttttaaatccaggatcaagaccacaatttattatgtaagacatggggtgaagaatggtcaaggaaagttatggccgtgagtgacatggaattagatgaaaaggctcaagtttgctgaagagagtttaaatttggcttttgctcttggaaacgtcaaaataatcataag

SEQ ID NO: 7121 - DNA, 178 bp, Homo sapiens; identical to SEQ ID NO: 5818
  misc_feature (1)..(178): n=a,t,g or c

SEQ ID NO: 7122 - DNA, 401 bp, Homo sapiens
  misc_feature (1)..(401): n=a,t,g or c
tttttttgcagaatggaacatcctttatgacataatttctgcccaggaagcattgcacaagaatattagcatggtctcctttctgttgtatccattccaccttggtttctttccactcttttctaggaaggggtctttgtatggaggactgtttccaaagcacaaagactctatggtcttagcaaggcccaaacatttaagtctggatgatcttcttcctttgctgcagctgctctttgacatcctgcacagggtgatgggctggcggccatgggtgtgcctctgggcctgtcatctgtcgtgttgttagactgctgatgagctgtcgctgcttgtctttaaagtctgcacttctctcttttccaattttggctgccactagacaatgaaaatcaagcagc

SEQ ID NO: 7123 - DNA, 452 bp, Homo sapiens; identical to SEQ ID NO: 6213
  misc_feature (1)..(452): n=a,t,g or c

SEQ ID NO: 7124 - DNA, 484 bp, Homo sapiens
  misc_feature (1)..(484): n=a,t,g or c
tttttttttctgcaccaaaatacatacattcatttatttctcattgcagcaacaagataaacaagtataattccatggtcaaggagttacaaatagtagcaagcccagtaaccttgagcatatctataaggcaaataaaacaaatatttctttcatagtgtgggcatccaactttagataatctggaaaaaaatcactctagcccctgaataccatgatgtgcatgatgtgcaaaatgaaagtatcacccaaaatattttcaaagctaaaaagaaaatatttaaattcaaatactttaaccaaattggaaatgcaaacagtacacttagagtcatccttagccagctgttctccaaacaaaagatcgagaaacaaaaccaagaacaatgtaaaaaagaaaaggtttatctagaaaaactggaagctcatcaaagtcacatttcttcttctgattcttgttctcgttcagcatttttcagaagtc

SEQ ID NO: 7125 - DNA, 404 bp, Homo sapiens
  misc_feature (1)..(404): n=a,t,g or c
ccgagacggtccccagagagccaccggaggagcagctcacctgagagacggagccccggctcgcccgtgtgcagagcggacaaggcaaaatctcagcaagttcggacctctagtacaataaggcgaacctcctctttggatacaataacaggaccttacctcacaggacagtggccacgggatcctcatgttcactacccttcatgcatgaaagacaaagctactcagacacctagctgttgggcagaagagggtgcagaaaagaggtcacatcagcgttctgcgtcatgggggagtgctgatcaactaaaagagcagatcgccaaactgaggcagcaactacaacgcagtaaacagagtagtcgtcacagtaaggagaaagatcgccagtcacctcttcatgg

SEQ ID NO: 7126 - DNA, 78 bp, Homo sapiens
  misc_feature (1)..(78): n=a,t,g or c
gtaaatgcttaagagttttaatcagtccgccataaaaagctcctccccattctccatcttgggggctcagatcttggc

SEQ ID NO: 7127 - DNA, 417 bp, Homo sapiens
  misc_feature (1)..(417): n=a,t,g or c
tttaacctaacattgtttttatttgaacattctaagtgaaaactccgagtgctttcagttgctttattctctaggtatgtccctggggcacggaggaaaaggagagtgttaccattttaacgaggagaaaatgaagacccaagtctagaactaaagagccagaactaaaactacatctttggatttagtttatcctttgaattcattgtttagatcctattggttttaccaaatgcatactgtgtttaaggattcacagttgaagaaaaaataatctgagaataatagatttaaatctgatattagatttaaatctgagaatattagatttaaatatctaacatgtttcacgtagaactgatgtagccaattctttaagcatggctttccaaacatctaggtatataattgtaattt

SEQ ID NO: 7128 - DNA, 413 bp, Homo sapiens
  misc_feature (1)..(413): n=a,t,g or c
tttgtttgaaattaaatttattaagcactcactcacgtgtatattgtcctagacagggttgcgtttcagagaacaaagatccctaacacgatcatccagtcccgtcactacctgactccctcctcccatacaataacacattcccccatctctaggacatagggatcttagtcccctccccccacctttttcttcttcttttttgagacagggtctcgctctgtcacccaggctggaatgcctctttccctggttgtcaatattatatagcctggcaatgaaaaaagggtgaagttttacagttctaaagatccattctttattttggtacaaaaataaactgttcaacctgtaaattgtcacttattttcgtattgttgtaaagcaaacttacagaataggaacacctgcta

SEQ ID NO: 7129 - DNA, 302 bp, Homo sapiens
  misc_feature (1)..(302): n=a,t,g or c
tttttgtattaatccaaagcaaatatattttatttaattggattattaatagttcactaacatcatactgtaggtatttttcttttctataaatgttttatattccagtctattcaaaaccttacgaaccaaatcctttaaaggacgtaagtacacatattttcaaaccaacaaaatagtaaaattcagggaacattagatggaatagggaagatgaaataacgaagcaactaagagatttacaagaatggagttcttctgccaccttgtggttgttctgtgttataacctagagctacatt

SEQ ID NO: 7130 - DNA, 415 bp, Homo sapiens
  misc_feature (1)..(415): n=a,t,g or c
ttttaagtatttatatgtgatttttaaaatttttttatttttatcactttttaaaaattatactttaagttttagggtacatgtgttggctagctaagtgatataaaataagtgatttaaatatagactgggtgtggtggctcatgcctgtaatcccagaactttggcctcatttatgataaatatagtaaattcaacaaactactccaagcattcaagaattttaatctcataaagaaaatactgtatttctaaaaataaagataggcatgatttattactattcagataagatggctgcataagtcctgattttaattctgaaatctttctattaagaaagatcagaagacaggtagacagagagacggggctgctacacaaatataatgggaagactccttaagtttctata

SEQ ID NO: 7131 - DNA, 212 bp, Homo sapiens
  misc_feature (1)..(212): n=a,t,g or c
atgggagaggaattattttatttggatactttatcagagttatatatacttgaaaatttgtttagtaaaatagcagtccccttgtgtactcccagagtttcatcacatagaagcaattatttcgttatttatctccttatgtctaaatagatattattactttttgattttcaagtttaggcactacctctccttcacatacttgctcatca

SEQ ID NO: 7132 - DNA, 420 bp, Homo sapiens
  misc_feature (1)..(420): n=a,t,g or c
tatggatgaataacagatgaatttattagatttttttctcaaaactactcagcaaaatgtacaattcaattcccgtcagtaaaacatgaggcatttagtgccttatgtgatgttctaggcatttgggcagtttcttttcatttaggtgggaatttaagacattttcatatgaagctaggtaataaaatgctgtggcaacattcatatgtttaaatgtcctaagaattgaagaggcatcaaagcttatatcagaaaataaaaaggtaaatgcgggtttggagtgattcaggagatgtgtggaagaacttatgatctgaagcaggcttgagagaagaggcagaaaagcaaagctgtgaaggaaggataagtttggcaggttttaagatgattctgctgaaggcaaagaaatgagagatagta

SEQ ID NO: 7133 - DNA, 320 bp, Homo sapiens; identical to SEQ ID NO: 4118
  misc_feature (1)..(320): n=a,t,g or c

SEQ ID NO: 7134 - DNA, 493 bp, Homo sapiens
  misc_feature (1)..(493): n=a,t,g or c
tttttttgccagggcggaccgtctttattcctctcctgcctcagaggtcaggaaggaggtctggcaggacctgcagtgggccctagtcatctgtggcagcgaaggtgaagggactcagcttgtagcccgtgcctgagtagaacttgttctggaattccacccagtgcagccgcagggcgtgcaggaaggctgagagtccctccatcaccagcaggatagccacggtcatcacggcaaaggcggcaaagatggggaccagcaccacagccgccacgcccacctcccggcccaggcccaggcctatgcgcatcaccatggcccacagaacctcggacagctgggcgtgggccaggctcagggcccacaggcgcaggtaggaggcggtgttggagacgcagcccaggcagaactcgatggtgtggatggcctggtgcatgagcactccggaggggacgagctcgggctcctcttcatcatccaggccccctggctt

SEQ ID NO: 7135 - DNA, 499 bp, Homo sapiens
  misc_feature (1)..(499): n=a,t,g or c
tttttaaagcctaagcataccctgagaacaacaaccttttttgattagaacagaagaaaaagccagagtgttcttgggctgccaaaatattaatacgtttgtctcaaagacgagccacttaggtgcttgcttagagacttctactttacacagaatttgaaaagtttgacagctggctacttactctgcaaaacggaagggagactttttagaacagcaactggtgatctggcaaaaatgaaaagtagaacttgtgaagaaatgagatggacttggtgtattaatagctaattttagaagaccctgtggatattctaaatcagcataatagtgatgtctgagccatagtgttaaattatgattactgtatttgaagtataagaaggcagaaaagtgtgatgctgttagaaaaaaatctcatttcaaatgattgaaggttaaaaacaattggggaaagattagagagggcaggcggtgctttaagggaggtggaataata

SEQ ID NO: 7136 - DNA, 208 bp, Homo sapiens; identical to SEQ ID NO: 3199
  misc_feature (1)..(208): n=a,t,g or c

SEQ ID NO: 7137 - DNA, 543 bp, Homo sapiens; identical to SEQ ID NO: 3948
  misc_feature (1)..(543): n=a,t,g or c

SEQ ID NO: 7138 - DNA, 470 bp, Homo sapiens; identical to SEQ ID NO: 640
  misc_feature (1)..(470): n=a,t,g or c

SEQ ID NO: 7139 - DNA, 147 bp, Homo sapiens
  misc_feature (1)..(147): n=a,t,g or c
gatcttcaatgcctctaagtcattgtaataaaaaatcagttatcactataccatgctataggagactgggcaaaacctgtacaatgacaaccctggaagttgctttttttaaaaaaataataaatttcttaantcaannnannanaa

SEQ ID NO: 7140 - DNA, 306 bp, Homo sapiens
  misc_feature (1)..(306): n=a,t,g or c
ggaaggggaaatgtaacgtgtctaagaaagtaagacaagcatcatattaaaaaaatctcttcgaggagcctagaggaaatcctatttttnatgcatttttaaactttttgtcatattgctttatttttccattttcacagcagaaaaaatcaagtctacgtgactacataaaagangtttgntcaaacagtgagacgggagcctccacatatgcacatccaggttgcttaaattcaccaattgctcattggaaaccacatctcaactcggtcatattgcttttagtggtttgtttctctgtagaga

SEQ ID NO: 7141 - DNA, 414 bp, Homo sapiens
  misc_feature (1)..(414): n=a,t,g or c
aggggtgggggtgtgtgtgggtgtgtgtgtgtgtgtttaatatgactatgtgtgatgtgcattagaaaatcagcaagtaaataactgttgctatgtattgtgagaaagatgggaccaggccaagaaacacaattaaaaggtggccctgggcccactgctttcctgggaagaacagtatctcataagcttgtgggtctcgtaggggtatggactgagctgcttagtggtaggaaaaatcaccaggggcagtgaaactgaagtcccagctacatttcccagctacgtaaatgttgatcctttagatctgggccatttctgcagtntcaatccacccactgaggcccagccctaaggaggaaagactgtgatttgtaaggtngatacactgacaanaataatatgagggagggnatt

SEQ ID NO: 7142 - DNA, 282 bp, Homo sapiens
  misc_feature (1)..(282): n=a,t,g or c
tccatgcccatcagggtttattgtttctgtaacagcggccacgcctgggggntgngtgttgcagctggagatctctcagcaccttgggttgggggcggggctgggcgggacatgggatggaggcggtgctgtggcagacagggtggaccttggggcctgcaggaggagatgagttcggcggccacagtggcccccagcagcagcagcagcagcgngaggttcagcgggcgcgntcaccgcaccaggtggaaggtgagccagtacatgagcataggntgcgcg

SEQ ID NO: 7143 - DNA, 409 bp, Homo sapiens
  misc_feature (1)..(409): n=a,t,g or c
atttttattgttattgataatacattagacattaccctcccatcaggtgcacagaagaaagtcaaggctggaatttcattctcttatctaaatctctctgttctctctcagggaatattttcagagaataggtggaatgaagtgaggctgtggagaatgttatctatgataggatagagggcatagaaggccaggagtcaggagacctgggttctgtcctggattatacaccagctcactgaggagctttgtcttctctggatcaagagtcccacctgaaaatgaaggaactggtccagataacactggagccctttcccccaagatgcactggcattcagaggatgggtgcaggtccagtcctcttctgcctgtggggtggatgctggcttggaagtgtgctgggtct

SEQ ID NO: 7144 - DNA, 235 bp, Homo sapiens
  misc_feature (1)..(235): n=a,t,g or c
tttttttttttaaagataaaattaatttatttgacttcacaacttcattgggccacacaggggccnacangtcctacgaagcacaaccttgtggaagtgggctggggaggcagttctctggactgcctgctcccttgtccagagctgccttgagccaggtccctcctgaccccatcatcctgttcccatatgcaagggctgctcaggtccacctgcaataaacccaggnctgcct

SEQ ID NO: 7145 - DNA, 309 bp, Homo sapiens
  misc_feature (1)..(309): n=a,t,g or c
tttccaggtttggaacataaattttatttaactttcacattgacacaatcaggaaaccattctgagaaaaggtagaggccgccttgaagcgaagcctggctccctcctccaccccgggctcgggggaaccatgcaggctcaggctggcactcatcccaggaaactgtcccagttctcagcggtcctggttgtggacggtatctgaaatggtcgttgcggtttgccctgcaccagggcctaccttgttgccaggaagccgcactgctggaggctacctgggcgctgggttttattgctggtgaactttgg

SEQ ID NO: 7146 - DNA, 439 bp, Homo sapiens; identical to SEQ ID NO: 6675
  misc_feature (1)..(439): n=a,t,g or c

SEQ ID NO: 7147 - DNA, 2334 bp, Homo sapiens; identical to SEQ ID NO: 433
  misc_feature (1)..(2334): n=a,t,g or c

SEQ ID NO: 7148 - DNA, 2530 bp, Homo sapiens
  misc_feature (1)..(2530): n=a,t,g or c
ccgtgcagtccgagatgggctcgtctcgggcaccctggatggggcgtgtgggtgggcacgggatgttggcactgctgctggctggtctcctcctgccagggaccttggctaagagcattggcaccttctcagacccctgtaaggaccccacgcgtatcacctcccctaacgacccctgcctcactgggaagggtgactccagcggcttcagtagctacagtggctccagcagttctggcagctccatttccagtgccagaagctctggtggtggctccagtggtagctccagcggatccagcattgcccagggtggttctgcaggatcttttaagccaggaacggggtattcccaggtcagctactcctccggatctggctctagtctacaaggtgcatccggttcctcccagctggggagcagcagctctcactcgggaagcagcggctctcactcgggaagcagcagctctcattcgagcagcagcagcagctttcagttcagcagcagcagcttccaagtagggaatggctctgctctgccaaccaatgacaactcttaccgcggaatactaaacccttcccagcctggacaaagctcttcctcttcccaaacctctggggtatccagcagtggccaaagcgtcagctccaaccagcgtccctgtagttcggacatccccgactctccctgcagtggagggcccatcgtctcgcactctggcccctacatccccagctcccactctgtgtcagggggtcagaggcctgtggtggtggtggtggaccagcacggttctggtgcccctggagtggttcaaggtcccccctgtagcaatggtggccttccaggcaagccctgtcccccaatcacctctgtagacaaatcctatggtggctacgaggtggtgggtggctcctctgacagttatctggttccaggcatgacctacagtaagggtaaaatctatcctgtgggctacttcaccaaagagaaccctgtgaaaggctctccaggggtcccttcctttgcagctgggccccccatctctgagggcaaatacttctccagcaaccccatcatccccagccagtcggcagcttcctcggccattgcattccagccagtggggactggtggggtccagctctgtggaggcggctccacgggctccaagggaccctgctctccctccagttctcgagtccccagcagttctagcatttccagcagctccggttcaccctaccatccctgcggcagtgcttcccagagcccctgctccccaccaggcaccggctccttcagcagcagctccagttcccaatcgagtggcaaaatcatccttcagccttgtggcagcaagtccagctcttctggtcacccttgcatgtctgtctcctccttgacactgactgggggccccgatggctctccccatcctgatccctccgctggtgccaagccctgtggctccagcagtgctggaaagatcccctgccgctccatccggatatcctagcccaagtgaagcctctggggccccagctagctgaccctgaagttttcctaccccaaggagagttactcgacagtccataagtcaactgttgtgtgtgtgcatgccttgggcacaaacaagcacatacactatatcccatatgggagaaggccagtgcccaggcatagggttagctcagtttccctccttcccaaaagagtggttctgctttctctactaccctaaggttgcagactctctcttatcaccccttcctccttcctcttctcaaaatggtagattcaaagctcctctcttgattctctcctactgtttaaattcccattccaccacagtgcccctcagccagatcaccaccccttacaattccctctactgtgttgaaatggtccattgagtaacacccccatcaccttctcaactgggaaacccctgaaatgctctcagagcacctctgacgcctgaagaagttataccttcctcttcccctttaccaaataaagcaaagtcaaaccatcatctggaaacagtggccacttttcactgacctctcttcgacatctagtcaacccacccaatatgccactgggtttcgctcccaattccaccccaccctccattacagagctcaccacgccctcctagatcaccgtccccaacacacccattgcctctcaaggcccttatctcagccccttcctgtggccatttccctcagtgcccagatgattccctgggtgagggagacactggggcaccctcagaggttggagcaggctccctgctgtccctggatcctggacagatggctcagtaaactgtgggactaggtgcagacttttgccttcttggagtcctgggtctcctctgagaggtctgggtggtgctcctcctacgcctctagaggtctctgtgttcctcattttccttcaaaagcgggctgtatttctcttctaccttccagctcctcccacagaggaggaagacaataaatatttgttgaactg

SEQ ID NO: 7149 - DNA, 4913 bp, Homo sapiens
  misc_feature (1)..(4913): n=a,t,g or c
cagctgctctggtggtctctcccaggctctgggggcggacccatgggaggggctgtttttgtacaaagctgtaacattgtggggacagggggccacaatgattcaactctacgggaaacctttacaaaaacctctctggcggtcccaactcccagagtcctcttctttcctcctgggtcacaggtcttaatgcaatttggttcagaatgcctctgcctcactcctgatcacatgtcagaccaagactgtggacaaggacaggcccagatgagaactaaagcttcccaggcagagagaggtcagacataagaagactgcctcaggaacctcacaagtggaggactcagggagggtcccaatccccaaaaattgagacaaagtcaggtggaaggttcatcggaggtgaccagctctccagaggactcgggaagaagtcaggggtatctatagatggagtcacaggttctgggcccctgccatcctctgcaggccatgcactttccctttcgatggaccctcacagagggagcatctgaatggggcatcctttgaaaaaggaacctaggaccctgtggatggactctgtcattctccatggtcctaaaaagcaaaagtcaaagtgttcttctgtgtaatacccataaagcacaggaggagatttcttagctcactgtcctccatcctagccagggccctctcccctctctatgccttcaatgtgattttcaccttgacccctgtcactgtgtgaacactgaagctttctttggacaaggcaccagactcacagttgtaggtaagacatttttcaggttcttttgcagatccgtcacagggaaaagtgggtccacagtgtcccttttagagtggctatattcttatgtgctaactatggctacaccttcggttcggggaccaggttaaccgttgtaggtaaggctgggggtctctaggaggggtgcgatgagggaggactctgtcctgggaaatgtcaaagagaacagagatcccagctcccggagccagactgagggagacgtcatgtcatgtcccgggattgagttcaggggaggctccctgtgagggcgaatccacccaggcttcccagaggctctgagcagtcacagctgagcccagggtgatggggcagaagagggaaggggagggggcctctcctcatagttccctgagatagcccagagaaagcccggtgggtaatgaatgagccacaacacctctccatctatctgcttcactgacagaggttctctgtagattcttcgtatattcctgtgctggattttataggaggccactctgtgtctctttttgtcacctgcctgagtcttgggcaagctctggaagggaacacagagtactggaagcagagctgctgtccctgtgagggaagagttcccatgaactcccaacctctgcctgaatcccagctgtgctcagcagagactggggggttttgaagtggccctgggaggctgtgctctggaaacaccatatattttggagagggaagttggctcactgttgtaggtgagtaagtcaaggctggacagctgggaacttgcaaaaaggggctggaatccagacggagcctttgtctctagtgcttaggtgaaagtgtatttttgtcaggaaggcctatgaggcagatgaggaggggatagcctccctctcctctccactattttgtagactgcctgtgccaagttaggttcccctactgagagatgggtagactcagcttggaaggggtcaccttgaacatctcctgtctccttgaagggtgccggtccacggccatgacagataaaagagcctctgaccttaccaccacggtcctaccgtttctctccctcacacagaaaggagaaggtcacagaagagggaacttgggggatcacacggggcctaattggtctgctgaccaccgcattttgggttgtaccattgtctacccctctacccaccagggttaaaattctactaaggaacaggagaggacctggcaggtggacttggggaggcaggagtggaaggcagcaggtcgcggttttccttccagtctttaatgttgtgcaactaatgaaaaactgttttttggcagtggaacccagctctctgtcttgggtatgtaaaagacttctttcgggatagtgtatcataaggtcggagttccaggaggaccccttgcgggagggcagaaactgagaacacagccaagaaaagctcataaaatgtgggtcagtggagtgtgtggtggggccccaagagttctgtgtgtaagcagcttctggaaggaagggcccacaccagctcctctggggtttgccacactcatgatgcactgtgtagcaatcagccccagcattttggtgatgggactcgactctccatcctaggtaagttggcagaatcagggtggtatggccattgtcccttgaaggcagagttctctgcttctcctcccggtgctggtgaggcagattgagtaaaatctcttaccccatggggtaagagctgtgcctgtgcctgcgttccctttggtgtgtcttggttgactcctctatttctcttctctaagtcttcagtccataatctgcctcctcactcccttcttggctcatcctccctcttatgtgcatggctctgcctctcctaagcctcttcctcttgcgccttatgctgcacagtatgcttaggcctttttcctaacagaatccctttggtccagagccatgaatccaggcagagaaaggcagccatcctgctgtcagggagctaagacttgccctctgactggagatcgccgggtgggttttatctaagcctctgcagctgtgctcctataattcacccctccactttgggaatgggaccaggctcactgtgacaggtatgggggctccactcttgactcgggggtgcctgggtttgactgcaatgatcagttgctgggaagggaattgagtgtaagaacggaggtcagggtcaccccttcttacctggagcactgtgccctctcctcccctccctggagctcttccagcttgttgctctgctgtgttgcctgcagttcctcagctgtagagctccttgcttagtcttcagggctgtgtgtttctttgctcttcttttcattgttttctgggactcttctcatctctactttcttagtggatgtattgttttactttcccttttttaaattgcatcttctccattttttccttcccattctaactccacttctgcattgttgactccttttggtgactagctctgtcttctatgttaagattctccccactgccagcctccagcacagaactctgctcatgtcttcatctccctccttctttctttctctaccagtcttagaagatgcatctatgtcttcctgaggtagtttgaaggttcatgagccaggcatgaccaggttggggagacaggtggtttcagggttgctcttgaggcctgagggcagaagtccctgtcacagcattgggcgagctgcagggagtctctgaggtgcctgtgtttggcaggtgtttgggagataggtctgaagagagtgttacaactggaaactgacattatcttagcaacagataaggtataaagaagacaaaatgggtaggagactctattttctttttttctgagacggtgtctagctctattgcccaggctggagtgcagtggcacgatctcggctcactgcaacctccgcctcctgggtttgagcgattctcctcccttggcctcccgagtagctgggattacaggtgcctgccaccaaacccagctactttttgcatttttagtagagatagggtttcactgtgttagccgggctgttctcaaactcctgacctcgtgatccgcctgccttgggcctcccgagtagctgggattacaggtgcctgccaccaaacccagctagctttttgcattttttagtagagatagggtttcactgtgttagccgggctgttctcaaatctcctgacctcgtgatccgcctgccttggcctcccaaagtgctgggattacaaatgtgagccactgcacccagccaagactccattctcttaagcctcagaatctatgctagaacaatagggtaaaggccccaccaggaagccctagtacaaccttccccatgctggggaggaagcagacaggcggtggagcggggttgggatgggatgaggtctaggatggagacatagacaagggtggaggaatgggactcatagggtctaccaaagtttaggggcttgggcagacattagtgtaggtggggacacacaccaagacgttgagtggaaagtacaaatcaccagattcaaaggcctgggttcaaggggctgtggtgggggaggtgtgcaatttgaaaagcaacttaagctgcctcctctctaagacatagaaacagaagagactaacttatatgaaaatcctttgtaaaggattttgtaaaggactcaacttgtggtgacaatccttttcattcctgttgtttatgatcactaggtcacagggtttgcctttttccaaacctgcatctcaattttcccatcaaaaacatttcccaaatttggataaagaacccatatctagacttgccacatttctgcaccaaaagctcactctcatggttggaacagagccaagcaaagggcacagtaaattgtggtttcttccactcctcatgtgtcttcagatgaaatcattctttccaataatcccagaaattctttctctcctctctcaagcatgtgaaaaggtccagagctctgcagtgtgagctttctactgaaatggcccttggactttgtggttcattcatactcagtggtctagcttgtactacttttgagaatgcaaagctt

SEQ ID NO: 7150 - DNA, 13500 bp, Homo sapiens; identical to SEQ ID NO: 1212
  misc_feature (1)..(13500): n=a,t,g or c

SEQ ID NO: 7151 - DNA, 2607 bp, Homo sapiens
  misc_feature (1)..(2607): n=a,t,g or c
attaaacctctcgccgagcccctccgcagactctgcgccggaaagtttcatttgctgtatgccatcctcgagagctgtctaggttaacgttcgcactctgtgtatataacctcgacagtcttggcacctaacgtgctgtgcgtagctgctcctttggttgaatccccaggcccttgttggggcacaaggtggcaggatgtctcagtggtacgaacttcagcagcttgactcaaaattcctggagcaggttcaccagctttatgatgacagttttcccatggaaatcagacagtacctggcacagtggttagaaaagcaagactgggagcacgctgccaatgatgtttcatttgccaccatccgttttcatgacctcctgtcacagctggatgatcaatatagtcgcttttctttggagaataacttcttgctacagcataacataaggaaaagcaagcgtaatcttcaggataattttcaggaagacccaatccagatgtctatgatcatttacagctgtctgaaggaagaaaggaaaattctggaaaacgcccagagatttaatcaggctcagtcggggaatattcagagcacagtgatgttagacaaacagaaagagcttgacagtaaagtcagaaatgtgaaggacaaggttatgtgtatagagcatgaaatcaagagcctggaagatttacaagatgaatatgacttcaaatgcaaaaccttgcagaacagagaacacgagaccaatggtgtggcaaagagtgatcagaaacaagaacagctgttactcaagaagatgtatttaatgcttgacaataagagaaaggaagtagttcacaaaataatagagttgctgaatgtcactgaacttacccagaatgccctgattaatgatgaactagtggagtggaagcggagacagcagagcgcctgtattggggggccgcccaatgcttgcttggatcagctgcagaactggttcactatagttgcggagagtctgcagcaagttcggcagcagcttaaaaagttggaggaattggaacagaaatacacctacgaacatgaccctatcacaaaaaacaaacaagtgttatgggaccgcaccttcagtcttttccagcagctcattcagagctcgtttgtggtggaaagacagccctgcatgccaacgcaccctcagaggccgctggtcttgaagacaggggtccagttcactgtgaagttgagactgttggtgaaattgcaagagctgaattataatttgaaagtcaaagtcttatttgataaagatgtgaatgagagaaatacagtaaaaggatttaggaagttcaacattttgggcacgcacacaaaagtgatgaacatggaggagtccaccaatggcagtctggcggctgaatttcggcacctgcaattgaaagaacagaaaaatgctggcaccagaacgaatgagggtcctctcatcgttactgaagagcttcactcccttagttttgaaacccaattgtgccagcctggtttggtaattgacctcgagacgacctctctgcccgttgtggtgatctccaacgtcagccagctcccgagcggttgggcctccatcctttggtacaacatgctggtggcggaacccaggaatctgtccttcttcctgactccaccatgtgcacgatgggctcagctttcagaagtgctgagttggcagttttcttctgtcaccaaaagaggtctcaatgtggaccagctgaacatgttgggagagaagcttcttggtcctaacgccagccccgatggtctcattccgtggacgaggttttgtaaggaaaatataaatgataaaaattttcccttctggctttggattgaaagcatcctagaactcattaaaaaacacctgctccctctctggaatgatgggtgcatcatgggcttcatcagcaaggagcgagagcgtgccctgttgaaggaccagcagccggggaccttcctgctgcggttcagtgagagctcccgggaaggggccatcacattcacatgggtggagcggtcccagaacggaggcgaacctgacttccatgcggttgaaccctacacgaagaaagaactttctgctgttactttccctgacatcattcgcaattacaaagtcatggctgctgagaatattcctgagaatcccctgaagtatctgtatccaaatattgacaaagaccatgcctttggaaagtattactccaggccaaaggaagcaccagagccaatggaacttgatggccctaaaggaactggatatatcaagactgagttgatttctgtgtctgaagtgtaagtgaacacagaagagtgacatgtttacaaacctcaagccagccttgctcctggctggggcctgttgaagatgcttgtattttacttttccattgtaattgctatcgccatcacagctgaacttgttgagatccccgtgttactgcctatcagcattttactactttaaaaaaaaaaaaaaaagccaaaaaccaaatttgtatttaaggtatataaattttcccaaaactgataccctttgaaaaagtataaataaaatgagcaaaagttgaa

SEQ ID NO: 7152 - DNA, 1574 bp, Homo sapiens
  misc_feature (1)..(1574): n=a,t,g or c
gcttctctccatcttgtgattcctttttcctcctgaaccctccagtgggggtgcgagtttgtctttatcaccccccatcccaccgccttcttttcttctcgctctcctacccctccccagcttggtgggcgcctctttcctttctcgccccctttcatttttatttattcatatttatttggcgcccgctctctctctgtccctttgcctgcctccctccctccggatccccgctctctccccggagtggcgcgtcgggggctccgccgctggccaggcgtgatgttgcacgtggagatgttgacgctggtgtttctggtgctctggatgtgtgtgttcagccaggacccgggctccaaggccgtcgccgaccgctacgctgtctactggaacagcagcaaccccagattccagaggggtgactaccatattgatgtctgtatcaatgactacctggatgttttctgccctcactatgaggactccgtcccagaagataagactgagcgctatgtcctctacatggtgaactttgatggctacagtgcctgcgaccacacttccaaagggttcaagagatgggaatgtaaccggcctcactctccaaatggaccgctgaagttctctgaaaaattccagctcttcactcccttttctctaggatttgaattcaggccaggccgagaatatttctacatctcctctgcaatcccagataatggaagaaggtcctgtctaaagctcaaagtctttgtgagaccaacaaatagctgtatgaaaactataggtgttcatgatcgtgttttcgatgttaacgacaaagtagaaaattcattagaaccagcagatgacaccgtacatgagtcagccgagccatcccgcggcgagaacgcggcacaaacaccaaggatacccagccgccttttggcaatcctactgttcctcctggcgatgcttttgacattatagcacagtctcctcccatcacttgtcacagaaaacatcagggtcttggaacaccagagatccacctaactgctcatcctaagaagggacttgttattgggttttggcagatgtcagatttttgttttctttctttcagcctgaattctaagcaacaacttcaggttgggggcctaaacttgttcctgcctccctcaccccaccccgccccacccccagccctggcccttggcttctctcacccctcccaaattaaatggactccagatgaaaatgccaaattgtcatagtgacaccagtggttcgtcagctcctgtgcattctcctctaagaactcacctccgttagcgcactgtgtcagcgggctatggacaaggaagaatagtggcagatgcagccagcgctggctagggctgggagggttttgctctcctatgcaatatttatgccttctcattcagaactgtaagatgatcgcgcagggcatcatgtcaccatgtcaggtccggaggggaggtattaagaatagatacgatattacaccatttcctataggagtatgtaaatgaacaggcttctaaaaggttgagacactggttttttttttt

SEQ ID NO: 7153 - DNA, 1630 bp, Homo sapiens
  misc_feature (1)..(1630): n=a,t,g or c
acgaggcctcgtgccactgctgagcaagaatggaggccccactggtgagtctggatgaagagtttgaggaccttcgaccctcctgctcggaggacccggaggagaagccccagtgtttctatggttcatctccccaccatctcgaggacccctccctctccgagcttgagaatttttcttccgaaataatcagcttcaagtccatggaggacctcgtaaatgaatttgatgagaagctcaatgtctgctttcggaactacaacgccaagaccgagaacctagctcccgtgaagaaccagttacagatccaagaggaggaggagacccttcaggacgaggagtaagaagtcttaattgccctctcctgcttcagtcgagagccctgtagtccttgtctccttgacatagtgctggtttctgtctataggtttatgggctattactttcattttcgtgttgccagcggagcagtgccctggtacttgctgtcatagctctatatatgtccctttacagtcccctgaggagaactttcttaaattgaaaccttagaggaatgaaggttttcctagatacaaaatggaatttcaggagcacagtaaatttcagggtctgtctatcttaagctttctttatatcagtggaaatccagcgagatattagaaataaaggccagaaaaaattaattaaccatgatggatgaatctatgttattggactaatttgcttcaagaaacaccagaattttgaaaatcccgaatttttgacagcccctcaggcctggagagttatctacagatgttaggatatgtccacataagaaagcatctaaactgaactgagagcacagcgggctaccctggacaaagtaaaggtggaaactaggtgatgtggcctttgagtatgcagattcctggtatcacttgctcgctactttctagggtcttaatagtagtcaagaaaagggatctgagaaaagtactctttcaggagggactagaaagagaagggggtgatatgttacacaaattaaagaaggatgtcttaggcatttagtaaaaattcagtggttccccgctatcctcgggggatgtgtttttttgttttgttttgttttgtttttttttgagatgaagtttcattctatcgcccaggctggagtgcaatggcacaattttggctcactgcaacctccacctcccaggttcaagctattctcctgcctcagcctcctgagtagctgggactacaggtgtgcgccaccatgcccgactaatttttgtattttgagtagagatgggagtttcaccatgttggccaggctggtctcgaactcctgacctggtgatttgcccgccttggcctcccaaagtgctgggattacaggcgtgagtcaccacacctggcccatggtgggggatatgttttaagacccccagttaatgcctgaaaccgctgctagtaccaaaccctaatgttttttcctgtatgtacgtacatatgataaagttcagtttataagttaggcacagtaagagactaacaacagctcacagccaaatagagcaattataacaatatattgtaataaaaattatgtggatgtgaaaaaaaaaaaaaaaaaaaaaaa

SEQ ID NO: 7154 - DNA, 1970 bp, Homo sapiens; identical to SEQ ID NO: 4853
  misc_feature (1)..(1970): n=a,t,g or c

SEQ ID NO: 7155 - DNA, 650 bp, Homo sapiens
  misc_feature (1)..(650): n=a,t,g or c
gccctggacaccaactattgcttcagctccacggagaagaactgctgcgtgcggcagctgtacattgacttccgcaaggacctcggctggaagtggatccacgagcccaagggctaccatgccaacttctgcctcgggccctgcccctacatttggagcctggacacgcagtacagcaaggtcctggccctgtacaaccagcataacccgggcgcctcggcggcgccgtgctgcgtgccgcaggcgctggagccgctgcccatcgtgtactacgtgggccgcaagcccaaggtggagcagctgtccaacatgatcgtgcgctcctgcaagtgcagctgaggtcccgccccgccccgccccgccccggcaggcccggccccaccccgccccgcccccgctgccttgcccatgggggctgtatttaaggacaccgtgccccaagcccacctggggccccattaaagatggagagaggactgcggatctctgtgtcattgggcgcctgcctggggtctccatccctgacgttcccccactcccactccctctctctccctctctgcctcctcctgcctgtctgcactattcctttgcccggcatcaaggcacaggggaccagtggggaacactactgtagttagatccccggg

SEQ ID NO: 7156 - DNA, 4750 bp, Homo sapiens
  misc_feature (1)..(4750): n=a,t,g or c
gttgcttcttcctccagaagtgggcgctgggcagtcacgcagggtttgaaccggaagcgggagtaggtagctgcgtggctaacggagaaaagaagccgtggccacgggaggaggcgagaggagtcgggatctgcgctgcagccaccgccgcggttgatactactttgaccttccgagtgcagtggtaggggcgcggaggcaacgcagcggcttctgcgctgggaaattcagtcgtgtgcgacccagtctgtcctctccccagaccgccaatctcatgcacccctccagagtggcccttgactcctccctctcctcactccatctttcctggcctctctccgggtgcttagcggacttggccaataacctcctccttttaaacgccctgaattgaaccctgcctcctgcgcatcctctttttgtgtcaccttagggttcagatttaactacgcgacttgactagtcatcttttgatctctctctcgtatttagtacttttagtcagcgagcatttattgatatttcaacttcagcctcgcggttaagagcttgggctctggaatcatacggctggaattggaattctgtcagtcgtgtggccgctctctactgtcttgtgaagataagtgagataatcttgacctgtggtgagcactcgtgagcgttagctgctgtatttaccaggtacagataagacaactacagtggatgataatgtatgtggtgataggggagtactctgatggtagaggagtgactttggttctctgcaaactcagcctgagactatcaattcagtttgtggtgagacctcgcagtgttaccttggcagatggtagaagccttccagatggaaggaaaaatgcgtgtaaaggcacaaagtgtagaaggaccctgaagctccagcgtgaggcctggcattgaatgaaatatattttgtgggttttcagctgctgaagtcataggaatggatgagaccaagaaaacaaagctgtttttgaggtatgagcggaagaagagatatcaggagactttcgaaacagtcataacggaagttaatatgatcattgctaacatttgctgtgtttcaggcactgtaagcatgtatatgggtccttaaagggactcatagaggtaggtactagtattgtttttccttttatcattgagaaactgaggtttgaagagattagtgaacttgctctagattatacagtttgtaagtggctgaaccaggatttgaactaatacaatctgactacagaggccacactccttagcactagaaaagaatggcatgccaagggcagagttatttctaggaagatgggatataagcgtcattgtcaagttgtgcaaaggggtcaacttggttgagatctaaaaaggaacactgaattcgtcaattcagaggctcgtaggaagtaggaaatccttatcttttcgtttgaaccttgagtggaacctagatattctggattaatgtataagtgaagttcatctttatatggtgacactcatactctagttgactacctaatagttcctctgccttctttcagttccgccaacatactgtgttctttaacattgtagaaccctttggctatgctagtctccttccctgaagtgttggtcctctagccctttttttgattggcaccagttagttcagatcttggctttattataaactcctctgagatatatgttccctgacagtttatctaaaatgattctctctacagttattttctattactgtgtttttgtttcctcagaggcatacatcacaatttggaattatgcattggtttatcaatttacttgtttattgtcaccctgctgcccagatatgacttcatgagggtaggatttgtatctgtttagttcattatttgtctagctataagtagtaaatattgtttgcatctatcagtgaatgagcatcttctgtttatgtagataatactgaactgttttgttttcttcaaagtaatcattaagctgaaggtaagaaaaacaagttcaaggaagtcacaccatggggaaaaaaaagtcaagtttagggctgcctcttccgggaagtgtcaaatctttagtatatttaggaataaaggtgccaaaccttatggttctttggatattgctaaggtattttcattggttagattaccagtttcattttccttattgactcaagagggctttaaactgagattgaagaagtaagaagattcctagataaaaccataaggaatggaaaaacaaaaatgataatacttgtccacaggaagtatataatcaaatgaaaagaactcaaataacaatctgtaatctatagcagagtaaagcggaagttgtaatagtgttgggggatgggggaagtcagaagaaccaccagtgaatatgaaaggagaagagaatcagagccatctgctaataaaatgggtagtcagctctttttgttttttttgtcttgttttgttttgagacagtctcgctctgtcgcccatgctggagtgcaattgcgtgatctcagctaactgcactttccgcctcctgggttcaagtgagtctcctacctcagtctccccagtagctaggattgcaggcacatgctaccacacctggttaatttttgtatttttagtagagacggggtttcacgatgttggccaggctggctggtctcgaactcctgacctcgtggaacgcccacctcggcctcccagagtgctgggattacaggcatgagccaccacgcctagccccggtagtcagctcttactgagaatattcaaagacagggcattcattttgtaagagacattccttccttcataggaagattggacctggtcttttagttcctcccaattttgagattctgtgagattgaatcggggcagagaaacatacttaatcttgaaagattaagtagaatttagatggatggataggagaaggactttccctacctttttacttcttgagatatagttatttgtaggtataatatacataaatatatgtattttttctctgtttacagacattcatagtttaataaaaaacttctttgtattatataaaggtttagatcagaactagtaaaacagaatgctgtttctttttttttcttttctattttactttaggttctgtgggtagatgtgcgggtttgttacatgggtaaattgcatgttgctgaggcttggtgtacgaatgatcctgtcactcaggtagtgagcatagtacctgataggtagcccttcaagccatacctccctttctttccaaccctcaaacagtccccagtctctgttcttcccatctttgtgtccatgttgaaatgctgttcttactacatttttttgaaggacatcaaaagagagtttgattatatcagaagcccccaaaagaagagagctactcagtggaatcaaggcatagtaaaatatagttgatccttgatatttgcaaaggataccaccatagcatagaatttgcttcatttccttttaaaacagaaatgtcattttactcctattgttatgtgttaaataagaaccttaataccagttgagatggaagtggtaggcaaagcttactagctctgataacctcctacttatcagctccaaagcatgttttaagcctttggctcagcaaaatgacatgtctctccatataagcaagagtgcttttttttttttctttgagacggagtcttgctctgtcaccaggctggagtgcagtggcgcgatctccgctcactgcaacctctgcctcctgggttcaagcgattctcctacctcagcctcctgagtagctgggactacaagagcacactaccacgcctggccaagagtgcttttaaatagttcattgtcaatgttaaatccttgagtgctcatttccttatttacctggctgttttctattcatctttcatgtctcaatttaaatgtcatgtttctttggtctcagagtaataaaaagtaaatatacttcccccatctcccgccccgcagagccttcctctgttgcccaggctggagtacagtggctcgatcttggctcactgaaagctctgcctcccagattcaagcgattctcctgcctcagcctcctgagtagctgggattacaggcgcgcgccaccaagcccggctaatttttgtatttttagtagagacagggtttcaccatgttggtcaggctggtcgaactcctgaccttgtgatcctcccaccttggcctcccaaagtgctgggattacaggcgtgagccactgcgtccagtgtaaattatacttttattttaatcctgctactactgcaagcaaggcaaacatttttgtgttacagcattacttgtatagattttaagaaaatctcattttaaatacggaaatgttaagaaaaattattgtgcctttgaccagaatgtgcctctaattgtacagttaaatctaactataaatactgcagtataaaataattatatacacattttttcacacctctttctctctatatatgcatatatacatatacatatatatacctatatgtattttttttacagacagtgatgtgtgttctgaaattgtgaaccatgagtctagtacttaatgatctgcttatctgctgccgtcaactagaacatgatagagctacagaacgaaaggtagtaaattacttaaattcaatttttccttgaaatgtgtgattagtaacccatta

SEQ ID NO: 7157 - DNA, 2073 bp, Homo sapiens; identical to SEQ ID NO: 6689
  misc_feature (1)..(2073): n=a,t,g or c

SEQ ID NO: 7158 - DNA, 465 bp, Homo sapiens; identical to SEQ ID NO: 6474
  misc_feature (1)..(465): n=a,t,g or c

SEQ ID NO: 7159 - DNA, 40046 bp, Homo sapiens; identical to SEQ ID NO: 6477
  misc_feature (1)..(40046): n=a,t,g or c

SEQ ID NO: 7160 - DNA, 1795 bp, Homo sapiens; identical to SEQ ID NO: 6699
  misc_feature (1)..(1795): n=a,t,g or c

SEQ ID NO: 7161 - DNA, 38374 bp, Homo sapiens; identical to SEQ ID NO: 6700
  misc_feature (1)..(38374): n=a,t,g or c

SEQ ID NO: 7162 - DNA, 1549 bp, Homo sapiens; identical to SEQ ID NO: 6704
  misc_feature (1)..(1549): n=a,t,g or c

SEQ ID NO: 7163 - DNA, 2148 bp, Homo sapiens; identical to SEQ ID NO: 6480
  misc_feature (1)..(2148): n=a,t,g or c

SEQ ID NO: 7164 - DNA, 339 bp, Homo sapiens; identical to SEQ ID NO: 6713
  misc_feature (1)..(339): n=a,t,g or c

SEQ ID NO: 7165 - DNA, 379 bp, Homo sapiens; identical to SEQ ID NO: 3403
  misc_feature (1)..(379): n=a,t,g or c

SEQ ID NO: 7166 - DNA, 367 bp, Homo sapiens; identical to SEQ ID NO: 6729
  misc_feature (1)..(367): n=a,t,g or c

SEQ ID NO: 7167 - DNA, 409 bp, Homo sapiens; identical to SEQ ID NO: 6494
  misc_feature (1)..(409): n=a,t,g or c

SEQ ID NO: 7168 - DNA, 434 bp, Homo sapiens; identical to SEQ ID NO: 6734
  misc_feature (1)..(434): n=a,t,g or c

SEQ ID NO: 7169 - DNA, 512 bp, Homo sapiens; identical to SEQ ID NO: 6506
  misc_feature (1)..(512): n=a,t,g or c

SEQ ID NO: 7170 - DNA, 359 bp, Homo sapiens; identical to SEQ ID NO: 6742
  misc_feature (1)..(359): n=a,t,g or c

SEQ ID NO: 7171 - DNA, 529 bp, Homo sapiens; identical to SEQ ID NO: 204
  misc_feature (1)..(529): n=a,t,g or c

SEQ ID NO: 7172 - DNA, 262 bp, Homo sapiens; identical to SEQ ID NO: 6516
  misc_feature (1)..(262): n=a,t,g or c

SEQ ID NO: 7173 - DNA, 435 bp, Homo sapiens; identical to SEQ ID NO: 6517
  misc_feature (1)..(435): n=a,t,g or c

SEQ ID NO: 7174 - DNA, 317 bp, Homo sapiens; identical to SEQ ID NO: 6522
  misc_feature (1)..(317): n=a,t,g or c

SEQ ID NO: 7175 - DNA, 414 bp, Homo sapiens; identical to SEQ ID NO: 6523
  misc_feature (1)..(414): n=a,t,g or c

SEQ ID NO: 7176 - DNA, 384 bp, Homo sapiens; identical to SEQ ID NO: 4418
  misc_feature (1)..(384): n=a,t,g or c

SEQ ID NO: 7177 - DNA, 244 bp, Homo sapiens; identical to SEQ ID NO: 777
  misc_feature (1)..(244): n=a,t,g or c

SEQ ID NO: 7178 - DNA, 329 bp, Homo sapiens; identical to SEQ ID NO: 6532
  misc_feature (1)..(329): n=a,t,g or c

SEQ ID NO: 7179 - DNA, 415 bp, Homo sapiens; identical to SEQ ID NO: 6540
  misc_feature (1)..(415): n=a,t,g or c

SEQ ID NO: 7180 - DNA, 231 bp, Homo sapiens; identical to SEQ ID NO: 6543
  misc_feature (1)..(231): n=a,t,g or c

SEQ ID NO: 7181 - DNA, 390 bp, Homo sapiens; identical to SEQ ID NO: 6548
  misc_feature (1)..(390): n=a,t,g or c

SEQ ID NO: 7182 - DNA, 465 bp, Homo sapiens; identical to SEQ ID NO: 2915
  misc_feature (1)..(465): n=a,t,g or c

SEQ ID NO: 7183 - DNA, 456 bp, Homo sapiens; identical to SEQ ID NO: 5334
  misc_feature (1)..(456): n=a,t,g or c

SEQ ID NO: 7184 - DNA, 436 bp, Homo sapiens; identical to SEQ ID NO: 549
  misc_feature (1)..(436): n=a,t,g or c

SEQ ID NO: 7185 - DNA, 265 bp, Homo sapiens; identical to SEQ ID NO: 6772
  misc_feature (1)..(265): n=a,t,g or c

SEQ ID NO: 7186 - DNA, 212 bp, Homo sapiens; identical to SEQ ID NO: 6567
  misc_feature (1)..(212): n=a,t,g or c

SEQ ID NO: 7187 - DNA, 434 bp, Homo sapiens; identical to SEQ ID NO: 6783
  misc_feature (1)..(434): n=a,t,g or c

SEQ ID NO: 7188 - DNA, 241 bp, Homo sapiens; identical to SEQ ID NO: 6788
  misc_feature (1)..(241): n=a,t,g or c

SEQ ID NO: 7189 - DNA, 409 bp, Homo sapiens; identical to SEQ ID NO: 744
  misc_feature (1)..(409): n=a,t,g or c

SEQ ID NO: 7190 - DNA, 357 bp, Homo sapiens
  misc_feature (1)..(357): n=a,t,g or c
ttaatataaaagtaaaagagtacattgttgagtagaggattaaaggagtgacgaccctttctaaagtggggtctcccatcccggatccctaagactgtaacatctgctacatacattaaaancaaaacaaaacaaaagcaaacatgaaacttatgacctgacttcactccacccttcatgcctgcattatgacagaaacacgtcccactgctcctacttatgtatgtacatccagaggctccaaacctaaggctgtgggccccctcctcccaggccccacacacacacacccctggcacacacatggcacacacatggcacacacatggcacacacacacatacctggctggcccat

SEQ ID NO: 7191 - DNA, 307 bp, Homo sapiens; identical to SEQ ID NO: 6569
  misc_feature (1)..(307): n=a,t,g or c

SEQ ID NO: 7192 - DNA, 257 bp, Homo sapiens; identical to SEQ ID NO: 6795
  misc_feature (1)..(257): n=a,t,g or c

SEQ ID NO: 7193 - DNA, 437 bp, Homo sapiens; identical to SEQ ID NO: 6570
  misc_feature (1)..(437): n=a,t,g or c

SEQ ID NO: 7194 - DNA, 509 bp, Homo sapiens; identical to SEQ ID NO: 6574
  misc_feature (1)..(509): n=a,t,g or c

SEQ ID NO: 7195 - DNA, 387 bp, Homo sapiens; identical to SEQ ID NO: 632
  misc_feature (1)..(387): n=a,t,g or c

SEQ ID NO: 7196 - DNA, 432 bp, Homo sapiens; identical to SEQ ID NO: 6811
  misc_feature (1)..(432): n=a,t,g or c

SEQ ID NO: 7197 - DNA, 346 bp, Homo sapiens; identical to SEQ ID NO: 6577
  misc_feature (1)..(346): n=a,t,g or c

SEQ ID NO: 7198 - DNA, 453 bp, Homo sapiens; identical to SEQ ID NO: 6817
  misc_feature (1)..(453): n=a,t,g or c

SEQ ID NO: 7199 - DNA, 5654 bp, Homo sapiens; identical to SEQ ID NO: 644
  misc_feature (1)..(5654): n=a,t,g or c

SEQ ID NO: 7200 - DNA, 55795 bp, Homo sapiens; identical to SEQ ID NO: 6579
  misc_feature (1)..(55795): n=a,t,g or c

SEQ ID NO: 7201 - DNA, 2226 bp, Homo sapiens; identical to SEQ ID NO: 6581
  misc_feature (1)..(2226): n=a,t,g or c

SEQ ID NO: 7202 - DNA, 4565 bp, Homo sapiens; identical to SEQ ID NO: 6582
  misc_feature (1)..(4565): n=a,t,g or c

SEQ ID NO: 7203 - DNA, 419 bp, Homo sapiens; identical to SEQ ID NO: 3212
  misc_feature (1)..(419): n=a,t,g or c

SEQ ID NO: 7204 - DNA, 5508 bp, Homo sapiens; identical to SEQ ID NO: 430
  misc_feature (1)..(5508): n=a,t,g or c

SEQ ID NO: 7205 - DNA, 1855 bp, Homo sapiens; identical to SEQ ID NO: 6838
  misc_feature (1)..(1855): n=a,t,g or c

SEQ ID NO: 7206 - DNA, 4957 bp, Homo sapiens; identical to SEQ ID NO: 6844
  misc_feature (1)..(4957): n=a,t,g or c

SEQ ID NO: 7207 - DNA, 2482 bp, Homo sapiens; identical to SEQ ID NO: 6587
  misc_feature (1)..(2482): n=a,t,g or c

SEQ ID NO: 7208 - DNA, 4656 bp, Homo sapiens; identical to SEQ ID NO: 6589
  misc_feature (1)..(4656): n=a,t,g or c

SEQ ID NO: 7209 - DNA, 2353 bp, Homo sapiens; identical to SEQ ID NO: 6590
  misc_feature (1)..(2353): n=a,t,g or c

SEQ ID NO: 7210 - DNA, 2134 bp, Homo sapiens; identical to SEQ ID NO: 6861
  misc_feature (1)..(2134): n=a,t,g or c

SEQ ID NO: 7211 - DNA, 1435 bp, Homo sapiens; identical to SEQ ID NO: 2030
  misc_feature (1)..(1435): n=a,t,g or c

SEQ ID NO: 7212 - DNA, 2517 bp, Homo sapiens; identical to SEQ ID NO: 6873
  misc_feature (1)..(2517): n=a,t,g or c

SEQ ID NO: 7213 - DNA, 7720 bp, Homo sapiens; identical to SEQ ID NO: 3973
  misc_feature (1)..(7720): n=a,t,g or c

SEQ ID NO: 7214 - DNA, 2436 bp, Homo sapiens; identical to SEQ ID NO: 6887
  misc_feature (1)..(2436): n=a,t,g or c

SEQ ID NO: 7215 - DNA, 882 bp, Homo sapiens; identical to SEQ ID NO: 6600
  misc_feature (1)..(882): n=a,t,g or c

SEQ ID NO: 7216 - DNA, 4211 bp, Homo sapiens; identical to SEQ ID NO: 6605
  misc_feature (1)..(4211): n=a,t,g or c

SEQ ID NO: 7217 - DNA, 4646 bp, Homo sapiens; identical to SEQ ID NO: 6929
  misc_feature (1)..(4646): n=a,t,g or c

SEQ ID NO: 7218 - DNA, 1763 bp, Homo sapiens; identical to SEQ ID NO: 6608
  misc_feature (1)..(1763): n=a,t,g or c

SEQ ID NO: 7219 - DNA, 3687 bp, Homo sapiens; identical to SEQ ID NO: 6609
  misc_feature (1)..(3687): n=a,t,g or c

SEQ ID NO: 7220 - DNA, 2422 bp, Homo sapiens
  misc_feature (1)..(2422): n=a,t,g or c
taaagtaacaacggtaataaagagttttcactctccaaatcacagggctcctaggtattttccctaaactaaccactgctttccaggatggcctgcctccttcgctcatttcagagaatttctgcaggggttttcttcttagctctttggggcatggttgtaggtgacaagctgctggtggtccctcaggacggaagccactggcttagtatgaaggatatagttgaggttctcagtgaccggggtcatgagattgtagtggtggtgcctgaagttaatttgcttttgaaagaatacaaatactacacaagaaaaatctatccagtgccgtatgaccaagaagagctgaagaaccgttaccaatcatttggaaacaatcactttgctgagcgatcattcctaactgctcctcagacagagtacaggaataacatgattgttattggcctgtacttcatcaactgccagagcctcctgcaggacagggacaccctgaacttctttaaggagagcaagtttgatgctcttttcacagacccagccttaccctgtggggtgatcctggctgagtatttgggcctaccatctgtgtacctcttcaggggttttccgtgttccctggagcatacattcagcagaagcccagaccctgtgtcctacattcccaggtgctacacaaagttttcagaccacatgactttttcccaacgagtggccaacttccttgttaatttgttggagccctatctattttattgtctgttttcaaagtatgagaaactcgcatcagctgtcctcaagagagatgtggatataatcaccttatcagaggtctctgtttggctgttaagatatgactttgtgcttgaatatcctaggccggtcatgcccaacatggtcttcattggaggtatcaactgtaagaagaggaaagacttgtctcaggaatttgaagcctacattaatgcttctggagaacatggaattgtggttttctctttgggatcaatggtctcagaaattccagagaagaaagctatggcaattgctgatgctttgggcaaaaaccctcagacagtcctgtggcggtacactggaacccgaccatcgaatcttgcgaacaacacgatacttgttaagtggctaccccaaaacgatctgcttggtcacccgatgacccgtgcctttatcacccatgctggttcccatggtgtttatgaaagcatatgcaatggcgttcccatggtgatgatgcccttgtttggtgatcagatggacaatgcaaagcgcatggagactaagggagctggagtgaccctgaatgttctggaaatgacttctgaagatttagaaaatgctctaaaagcagtcatcaatgacaaaagttacaaggagaacatcatgcgcctctccagccttcacaaggaccgcccggtggagccgctggacctggccgtgttctgggtggagtttgtgatgaggcacaagggcgcgccacacctgcgccccgcagcccacgacctcacctggtaccagtaccattccttggacgtgattggtttcctcttggccgtcgtgctgacagtggccttcatcacctttaaatgttgtccttatggctacccgaaatgcttggggaaaaaagggcgagttaagaaagcccacaaatccaagacccattgagaggtgggtgggaaataaggtaaaattttgaaccatccctagtcatttccaaacttgaaaacagaatcagtgttaaattcattttattcttattaaggaaatactttgcataaattaatcagccccagagtgtctttaaaaaattctcttaaataaaaataatagactcgctagtcagtaaagatatttgaatatgtatcgtgccccctccggagtctttgatcaggatgacatgtgccatttttcagaggacgtgcagacaggctggcattctagattacttttcttactctgaaacatggcctgtttgggagtgcgggattcaaaggtggtcccacggctgcccctactgcaaatggcagttttaatcttatcttttggcttctgcagatggttgcattgatccttaaccaataatggtcagtcctcatctctgtcctgacttcataggtgccaccttgtggtttaaagaagggaagctttgtacctttagagtgtaggtgaaatgaatgaatggcttggagtgcactgagaacagcatatgatttcttgctttggggaaaaagaatgatgctatgaaattggtgggtggtgtatttgagaagataatcattgcttatgtcaaatggagctgaatttgataaaaacccaaaatacagctatgaagtgctgggcaagtttacttttttttctgatgtttcctacaactaaaaataaattaataaatttatataattct

SEQ ID NO: 7221 - DNA, 4139 bp, Homo sapiens; identical to SEQ ID NO: 5408
  misc_feature (1)..(4139): n=a,t,g or c

SEQ ID NO: 7222 - DNA, 147 bp, Homo sapiens; identical to SEQ ID NO: 6947
  misc_feature (1)..(147): n=a,t,g or c

SEQ ID NO: 7223 - DNA, 4466 bp, Homo sapiens; identical to SEQ ID NO: 6399
  misc_feature (1)..(4466): n=a,t,g or c

SEQ ID NO: 7224 - DNA, 975 bp, Homo sapiens; identical to SEQ ID NO: 2065
  misc_feature (1)..(975): n=a,t,g or c

SEQ ID NO: 7225 - DNA, 2692 bp, Homo sapiens
  misc_feature (1)..(2692): n=a,t,g or c
tgtgtaacaatctcgcaaagacgttcccctccgtctcctcatcctcttttcaaacccttttacgatttcccatctcactcagcatgacagtcaaagtccctgtgatggccaacttctgcatcacctagccagtctgccaccgccaaaactctccagcctcatctttctactcttcccctggttccttgcccacgcctttacacttgttctctgcttggaatcttccctcccctccttgaggaactttctcaaatgtcaccttccctcaatactccccctcctccatttaaaactataaacttccaactctctaagcccctaaagtactctatatttaacttattgtataaactactgtccctacttgtaagttccaagattgcagggattcacccgctttgttcactgctgtctgccaaggtctagaacagtgcaagttacccaacaggagttcaataaacagccattcatttaacaaatatttgctgagcacttcgtcccgtccaagtttgttaaatcaagacaaataagacaccgtccctgcctttaacgcaccagatggagaaatgcaccacagacataaatgtgcaatacaggcctgacactacggccacaagcaagtcaaagaacgtgccaaaagttcagaggaagaagcctcggcttcgcctttcgggagaccagtccagctttccaccatcacgctgctcatcagggaccatctccgggggtctcctctagaccccaagggaggagcgggtcccgcccgccattcccaggtctcagagtttacttgtccagagatgcaacttccggcctcttcaggccgggcaagatttaaggaaagaaaagaaacataaggacctccgttcttcggtctccgtcccctccccttcccccgcgtgccgtccccacaacgggccaggactgaacccaactctcgaccaactcccggcagcaaaactaagcaccctacttccgttgtccccacctgttcccggcgtccccttcggctactcccggcgtttgcgcaagcggtcccacgtgggctcgggcggggctagcgccgcggcgggggctgggcacgcccctagcgcatagctggcttctgattggctttccggtgctcgcccgagcagggttggggcgagtggaccgcgcctctaaaggcgcttgccagtgcaatctgggcgatcgcttcctggtcctcgcctcctccgctgtctccctggagttcttgcaagtcggccaggatgtctcaggtacagcgcgtgcacagccaggctgcgaaggtgcagcgggcgggaggcccgttgggggctcagccggctgccagaagctctcgggctctttccttccgtgcccctcacttgctcatgggcccatgcctagccctgattcgttggacagagccttgtgagcgggattttccgtttggggatttctaaatctgctgcccaccccgcaactgccggaaagttgcccatggggtggacttcgctgtgtagcgggagaggggtgggagtcgagggtgcttgatggagagatgggggaaggggttgcacggattggaggagcgaggagactcagtccccatcccgaagcacagggcaggacgtcgcggcggagtggggaagcgaggagtccgtggccgggagcttggaggtcaggggaagtacggggccggctgctcagagtgcgggacgaggagaatcgcggcccggggagaggtgacccaggggcccctcccttctctccagtgtagacccttgtctgagaccgagctatgtggggcgacctctggctcctcccgcctgcctctgccaatccgggcactgggacagaggtcggtgttgaacgcgcgggccccagggggagggaggggaccaacgggctccggcgctgacaccgcggcactcatgccctgtcccctttcagctgtttccagcatactgtgccccgtctgtcctcaggccagggcttcgctgcagccccggccactccctagtgcctggcccggtggtggccaggcagttggccgcgctgcttctcccgcagaggggacccccactggggcgaaggcttggcctgccctcttcactgctgtatttccagacctgatgcctgcgtttgtgagagctctggatatatggttttcgattgaatgagtgaactggaggggcttccccttcttgtgttgctgaatctttctagctgccctgttggggcagggaggggcagacacacttcaggggctgcattgcccgaagggtgccacctttcccacctctccatccccgtaactgggctgtcatcaggccacagtaggattcttaccctctcccacccagaggaggccctcaatcctctcctctcccttccatttaggctgagtttgagaaagctgcagaggaggttaggcaccttaagaccaagccatcggatgaggagatgctgttcatctatggccactacaaacaagcaactgtgggcgacataaatacaggtatgcagagcgggggttggaagggcatctgctcatcaaagcaggctcagcagcccagactggaagtccctgggaacttcactctcaaactgcctgaggccctactcttcaggtggggtatggtgatggttcctgaggtggaaaagaccatgttccggattctcagtgtctccagtagtaacagaattc

SEQ ID NO: 7226 - DNA, 1922 bp, Homo sapiens; identical to SEQ ID NO: 687
  misc_feature (1)..(1922): n=a,t,g or c

SEQ ID NO: 7227 - DNA, 1763 bp, Homo sapiens; identical to SEQ ID NO: 701
  misc_feature (1)..(1763): n=a,t,g or c

SEQ ID NO: 7228 - DNA, 2139 bp, Homo sapiens; identical to SEQ ID NO: 6613
  misc_feature (1)..(2139): n=a,t,g or c

SEQ ID NO: 7229 - DNA, 929 bp, Homo sapiens; identical to SEQ ID NO: 6972
  misc_feature (1)..(929): n=a,t,g or c

SEQ ID NO: 7230 - DNA, 405 bp, Homo sapiens
  misc_feature (1)..(405): n=a,t,g or c
cagactctccaccagcagcagcagcagcagcagcagcagcaagagaagcttccaattaggcagggggttgtacgctccctgtcctatgaggaacccagaagacactcaccccccattgagaagcagctctgtccagccattcagaaactcatggtcaggagcgcagacctccacccattgtcagagctgcctgaaaaccggccttgtgaaaatggcagtacccattctgcgggagaattttttacaggacctgtccagccagggtctcctcacaacattggaacttctcgtggtgtacaaaatgcttccagaactcagaacctgttcgagaaacttcagagtaccccaggggcagcaaacaagtgtgaccctagtacaccagcacctgccagctcagctgccctg

SEQ ID NO: 7231 - DNA, 339 bp, Homo sapiens
  misc_feature (1)..(339): n=a,t,g or c
tgcttgggtacctcttgcaataaccagctcttagttgttccctttccctggggcttttccatttaacacatggagcccttcccccagaaggctacttccttgttttagaggaaggtactgcccattgggagatggggacattgggacctcagcaatgaagaacccttgtgaagtaaccaggaggaatggggaaagaagcaagttgggcaggatatggcctacttccataggcttttcttttttcagttttatgtaagcatggcttacatccccagtacatacttttactattgtggatacctgcactagtagcagtaagtcacaattgtgtctctcact

SEQ ID NO: 7232 - DNA, 303 bp, Homo sapiens
  misc_feature (1)..(303): n=a,t,g or c
acagagtggtgcaagacactgtagattaacggtagaggagaaattgtgcccttagtgttaacaatgtgccttttgttctgaatgccatgttgtagggcatgcattttttggcctctttaactcttcgaattctagtcagtaagatggaacccatctctgcaaagatacatctgtcttaaatatctagttacaggccttaatagaaccataaggcatgactcatcttcaggcactgaaaaagataaccatcaggtagtgttacacaaggacttcctatatttaggggttaagatggtcttgttg

SEQ ID NO: 7233 - DNA, 583 bp, Homo sapiens
  misc_feature (1)..(583): n=a,t,g or c
ggaaatgaagcaagtgaaatcgaatctgtaaaaattagtgcaaaaaagccaggaagaaagctcaggcccattagtgatgactctgaaagcattgaagaaagtgatacaaggagaaaagttaaatcagcagagaaaataagtacacaacgtcatgaggttattcgaaccacagcgtcttcagaactttcagagaaaccagctgagtctgtcacttctaaaaagacaggaccccttagtgcccagccctctgttgaaaaagagaacttggcaatagaaagtcaatctgaaaactcagaaaaaagggaagatatctcatgacaaaaggaagaaatcaagaagtaaagccataggtccagatacttctgacattgtgcacatttggtgtccagaaggaatgaaaaccagtgacatccaggagttggatattgttttgcctgaatttgagaaaacccncctagagcatcnaccaagaataggatctaaagtttgttangcagccatcgccacattttatgttatgtttaagaccattctccaatgcnttaagaagccagtgttgccaatctgaaaggaagatgctagt

SEQ ID NO: 7234 - DNA, 298 bp, Homo sapiens
  misc_feature (1)..(298): n=a,t,g or c
cttcgccgggccccaggctcagcaggccgcccgggnaagtcaacacggcgtcgctgttccgcatcgggcaggagacagtccaggacatcgtgtaccgcaccatggagatcttccagctcctgaggaacatgcagctgccaaatggtgtcacttaccacactggaacatatcaagaccggttaacaaagctacaggataatcttcgccaactttcagttctcttcaggagctgagattggtttatgacaaatgcaataaaactgtggtgggatggatccattccagtcgagcactattc

SEQ ID NO: 7235 - DNA, 533 bp, Homo sapiens
  misc_feature (1)..(533): n=a,t,g or c
ctttaaaccaatagtcccagaagagaccctctgaaagtctaggactggatattaaaatgcctgaacctgttatctaaatccttttttaagaaacttaatgttccagctcttgaactacactgtggaacagtaatttgtgcccaatttagtggaagataatgaggctcactgtaaacactacattgtcctgcagagtaattctgatgagagtcctactgacttctagagccattctctttaaccgtctgcaggtctaaggattaactatatgtgtgatttgtaataaaactgagttgtacaacactgcctgtgtgtgtgtggccaagacatttgcttcacttttaaaatgcacgtgatctttggagaggtgaattattctacaaattgcaccctaagtctcattgtttaagacctaactgatctaataccatctacacaaaagggtgttgtacttgcagaacttagtttataaaacaaagaatgtgtatttcttcaatagccgggtatttggattgtctcttgataatatttga

SEQ ID NO: 7236 - DNA, 433 bp, Homo sapiens
  misc_feature (1)..(433): n=a,t,g or c
gaaggttgaacctcgaagatcagacccagggacaagtggtgaagcatacaagagaagtgctttgattcctcctgtggaagaaacagtcttttatccttctccctatcctataaggagtctcataaaacctttattttttactgttgggtttacaggctgtgcatttggatcagctgctattttgcaatatgaatcactgaaatccagggtccagagttattttgatggtataaaagctgattggttggatagcataagaccacaaaaagaaggagacttcagaaaggagattaacaagtggtggaataacctaagtgatggccagcggactgtgacaggtattatagctgcaaatgtcctctgtattctgtttatggagagtacctctctgcagcggacaatgatcagatatttcacatcggatccagcctca

SEQ ID NO: 7237 - DNA, 320 bp, Homo sapiens
  misc_feature (1)..(320): n=a,t,g or c
gcaacccaggggaaaaatgcggcctttgactgaagaggagacccgtgtcatgtttgagaagatagcgaaatacattggggagaatcttcaactgctggtggaccggccccatggcacctactgtttccgtctgcacaacgaccgggtgtactatgtgagtgagaagattatgaagctggccgccaatatttccggggacaagctggtgtcgcttgggacctgctttggaaattcactaaaacccacaagtttcggttgcacgtcacagctctggattaccttgcaccttatgccaagtataaagtttggataaagcctgg

SEQ ID NO: 7238 - DNA, 368 bp, Homo sapiens
  misc_feature (1)..(368): n=a,t,g or c
aaatgaatcattatataggtatgtctttgcttccattttgagacatttagatttttacagcctgtttctatagcatttgatgttacaactctaagcgtagttcaaagacatttaaattgacaagttaccagttaaagaatttagaatatattagatcccatctagtattatatattttttctagttgatcattgagcagtaaataccaaatactcgattagaaggtaatttttacattgttttgaaagggtgaaacaatttatctcctctggtattattcttaaaccacagatagggatagtagggtagtgaaacgaataaatacctggtagaagacaagagacttgggctctacacctggctctgca

SEQ ID NO: 7239 - DNA, 454 bp, Homo sapiens
  misc_feature (1)..(454): n=a,t,g or c
gcgataaggagctggttaccattatccccaacttcagtctggacaagatctacctcatcgggggggacctggggccttttaaccctggtttacccgtggaagtgcccctgtggctggcgattaacctgaaacaaagacagaaatgtcgcctgctccctccagagtggatggatgtagaaaagttggagaagatgagggatcatgaacgaaaggaagaaacttttaccccaatgcccagcccttactacatggaacttacgaagctcctgttaaatcatgcttcagacaacatcccgaagcagacgaaatccggaccctggtcaaggatatgtgggacactcgtatagccaaactccgagtgtctgctgacagctttgtgagacagcaggaggcacatgcaagctggataacttgaccttgatggagatcaacaccagcgggactttcctcacag

SEQ ID NO: 7240 - DNA, 346 bp, Homo sapiens
  misc_feature (1)..(346): n=a,t,g or c
tcagctttaaaacttagctgtcgttcagttaagcttaaagataggttaatttgtaaatggcaaagtttgttttgaggtttttcctcaataacttgtttcccaggcctattaggcatctctaaaattgatctagctgttttatttttatgtactcttagttttatgtaagaaaccttaggatgagctcccttttctaaggtgtttttgttttttgtatgtttgcttttttcctgttttttgttttttccatttacggcagtggtaccatgttttggatgtgtgatgtttatatgggagaacaaaaagctgatgtatagccctgtatacagtgtagatactatttttg

SEQ ID NO: 7241 - DNA, 464 bp, Homo sapiens
  misc_feature (1)..(464): n=a,t,g or c
aaaaagttaacttttaacatagctgctcagggattaaatcagattggaaaacccattctgactccacatactgctacaaagaaatacatcgttgtttatattgagctgcaggagatagtacactttaaacttaagaaagttaaatgtttcacaataacattgcaatataatcttcagctactctctttccattggtaaaatctctgatggtgtgataactctttgccaacctacgaaacccatatctggaagaatcaccagctcccgtgagcagcttcatgtaaatagatgcactccaagcagattgcatgcctcaggtgtttgtcttctagtaatcatggagtgtgcaacacccagagtaacactacaaggggcaggactgcaaacagcaggtcctggctaaaaacccttaatgctgcattgctgccagttgtaaagagatgcctgaatggaggcaagttctg

SEQ ID NO: 7242 - DNA, 498 bp, Homo sapiens
  misc_feature (1)..(498): n=a,t,g or c
gcacgagggactggggcggccacgcactccgccagaaggtcgccaggagcctccgcccttcaccttcctcggaaatccgccaggccacgncaagctccctgcccaacccttactgacgggggccacattttcccggcctccgcagccagaccttgacacaaaggacatcaaactgccgagggtaaaaaccccggaagggcggacacctccacatcgccttttgccacctttccctttatttccggagatatttattgagtgtctactgtgtgccaggcactatatctatgtgcataganaaaccctggaaggccatacaacagtatatatagagtgatcgtctctgcttgctgagctaacaggggtgtcaagcttccattttggtatctacttctaaatacactcagaacaggagaaatttggactaattttcaaactacagacactttctaatcatgatgcatttcaaaagtggactcgaattaactgagttgcaaa

SEQ ID NO: 7243 - DNA, 590 bp, Homo sapiens
  misc_feature (1)..(590): n=a,t,g or c
aacgggtcggagaaaaaggaaaaaagaagggctcagcgcctccccgccgggccgtggacagaggggcacagtttcggcaggcgggtgaggtcgctgagggcccgccggagatgttttccttgtcgagcacggtgcaaccccaggttacagttcctctgagtcatctcatcaatgccttccatacaccaaaaaacacttctntttctctcagtggagtgtcagtttctcaaaaccagcatcgagatgtagttcctgagcatgaggctcccagcagtgagccttcacttaacttaagggaccttggattatctganttaaaaattggacagattgatcagctggtagaaaatctacttcctggattttgtaaaggcaaaaacatttcttcccattggcatacatcccatgtctctgcacaatccttctttgaaaataaatatggtaacttagatatatttagtacattacgttcctcttgcttgtatcgacatcattcaagagctcttcaaagcatttgttcagatcttcagtactggccagttttcatacagtctcggggttttaaaactttgaaatcaaggacacggcgg

SEQ ID NO: 7244 - DNA, 439 bp, Homo sapiens
  misc_feature (1)..(439): n=a,t,g or c
gagcaggacatcccgctggtggagagctactcctttgaggcccgaatggaagtggatgcagatggaaatggtgctaagatatttgcctatgcctttgacaagaaccgaggaaggggctctgggagactccttcatgagctgctgtgggagcggcaccgggggggcgtggcccgggcttccaggtggtgcacctcaacgctgtgaccgtggacaatcgcctggacaacctgcaactggtgccgtggggctggcggcccaaggctgaagagacctccagcaagcagagggagcaaagcttgtattggcttgcaattcagcagctgcctacagaccctatagaagaacagtttcctgtcctaaatgtgacccggtattataatgccaacggggatgtagtggaagaggaggagaactcttgcacctactatgagtgccacta

SEQ ID NO: 7245 - DNA, 318 bp, Homo sapiens; identical to SEQ ID NO: 6431
  misc_feature (1)..(318): n=a,t,g or c

SEQ ID NO: 7246 - DNA, 472 bp, Homo sapiens; identical to SEQ ID NO: 3575
  misc_feature (1)..(472): n=a,t,g or c

SEQ ID NO: 7247 - DNA, 476 bp, Homo sapiens
  misc_feature (1)..(476): n=a,t,g or c
aattatttgaagaatgtcttcttttaaatgtacatggaatgatagatttggaaaaattaccattttacaacccttaatgtaattaaatctggcaaaaatcgatggtaaaacccattaagtggaaaaaattttaaggaactttgtttacaaggtgtcagaacatcacagatatctattgcaaaagaattgcctttacagtgagatttggctatcaaactgcatttcactacttctggaataagccagcattatgtggctcttgatgggatgcggtatgaagcatgtgtgatcatccttgatgtactgccgaaaatgtttacctcaaatttaattaaatctttcttttgtctagacttatcttcctgtttaaagaaatacaggaatagaggaacaagttgaattacacagtatggaaataaatagacaagtccagagttggtataggacaactggacttttttttttatatatttatt

SEQ ID NO: 7248 - DNA, 335 bp, Homo sapiens; identical to SEQ ID NO: 3984
  misc_feature (1)..(335): n=a,t,g or c

SEQ ID NO: 7249 - DNA, 402 bp, Homo sapiens
  misc_feature (1)..(402): n=a,t,g or c
cgcgactccaggcatcagcaggactcagacctctcagcagcgtgctctgacgctgacctccacagacacaaaaaaaagaagaagaaaaagaagagacattcaagaaaatcagaggactttgttaaagattcagaactgcacttacccagggtcaccagcttggagactgtcgcccagttccggagagcccagggtggatttcctctctctggtggcccgcctctggaaggcgtcggacctttccgtgagagaacgaaacacttacggatggaaagcagggatgacaggtgtcgtctctttgagtatggccagggtgattgaaaactcagcctcaaaacaaaaaattcactagttatgattcaacgcgttcaacagaagccatccccagctcagcttaaatta

SEQ ID NO: 7250 - DNA, 415 bp, Homo sapiens
  misc_feature (1)..(415): n=a,t,g or c
ggcttttattttccatttggaacgtgggacaacagaccacaacgcaattccattttgcaagtctttccaagggagaagctgttcaaccacccgtttgggggatgagtgagccgacactttcctttggtctttctgaatcgtaactgcactgctttctggaccatttctaaggcggcctttacaagaagacattcctgttggagaggagggtggacttcggagaaattctcatactgaagcatgagcttaggagtttctgttagtggtagtggtgttttggacacttcattccttgcaacaccgaggttttgggtgttgacataaagtggaccacacaccacatctgctgccgtcttgacacttttttttgtttggttggttttgttacatcttacattatgcagaactatttttg

SEQ ID NO: 7251 - DNA, 1253 bp, Homo sapiens; identical to SEQ ID NO: 3067
  misc_feature (1)..(1253): n=a,t,g or c

SEQ ID NO: 7252 - DNA, 2192 bp, Homo sapiens
  misc_feature (1)..(2192): n=a,t,g or c
cggcacgagctaggatctgtgactgccacccctccccccacccgggctcggcgggggagcgactcatggagctgccgtaagttttaccaacagactgcagtttcttcactaccaaaatgacatcattttccacctctgctcagtgttcaacatctgacagtgcttgcaggatctctcctggacaaatcaatcaggtacgaccaaaactgccgcttttgaagattttgcatgcagcaggtgcgcaaggtgaaatgttcactgttaaagaggtcatgcactatttaggtcagtacataatggtgaagcaactttatgatcagcaggagcagcatatggtatattgtggtggagatcttttgggagaactactgggacgtcagagcttctccgtaaagaacccaagccctctctatgatatgctaagaaagaatcttgtcactttagccactgctactacagatgctgctcagactctcgctctcgcacaggatcacagtatggatattccaagtcaagaccaactgaagcaaagtgcagaggaaagttccacttccagaaaaagaactacagaagacgatatccccacactgcctacctcagagcataaatgcatacattctagagaagatgaagacttaattgaaaatttagcccaagatgaaacatctaggctggaccttggatttgaggagtgggatgtagctggcctgccttggtggtttttaggaaacttgagaagcaactatacacctagaagtaatggctcaactgatttacagacaaatcaggatgtgggtactgccattgtttcagatactacagatgacttgtggtttttgaatgagtcagtatcagagcagttaggtgttggaataaaagttgaagctgctgatactgaacaaacaagtgaagaagtagggaaagtaagtgacaaaaaggtgattgaagtgggaaaaaatgatgacctggaggactctaagtccttaagtgatgataccgatgtagaggttacctctgaggatgagtggcagtgtactgaatgcaagaaatttaactctccaagcaagaggtactgttttcgttgttgggccttgaggaaggattggtattcagattgttcaaagttaacccattctctctccacgtctgatatcactgccatacctgaaaaggaaaatgaaggaaatgatgtccctgattgtcgaagaaccatttcggctcctgtcgttagacctaaagatgcgtatataaagaaagaaaactccaaactttttgatccctgcaactcagtggaattcttggatttggctcacagttctgaaagccaagagaccatctcaagcatgggagaacagttagataacctttctgaacagagaacagatacagaaaacatggaggattgccagaatctcttgaagccatgtagcttatgtgagaaaagaccacgagacgggaacattattcatggaaggacgggccatcttgtcacttgttttcactgtgccagaagactaaagaaggctggggcttcatgccctatttgcaagaaagagattcagctggttattaaggtttttatagcataatggtagtacgaacataaaaatgcatttattcagttcacttaccacattatttgaaaatcaatcctttatttaattttatttccaacctgtcagagaatgttcttaggcatcaaaatccaaggtagctgtaagaaaaatactggagctaacaatgaagaacagaagtaatctgattagtcaaattattaagtgccatggattactttatgcagcagtcaggtacatagttaggtgaacccaaaagaaaaactcttgaaaacaagagatttcttccatgcacatttacaatattgaggtataattaacatgataaagtgtttccttctaacgagttgtagaaatctgagtaaccacccaaaaaagcaatagaatgtttgtgtcaccccaaaacactcccttctgcccctcttcagacagtccttcagctatttcatggctctcaccctagtttttttttttttttgcacttttttttttccgggggtataggggaggtgtggggcgacagggtctgtcttgttctgtctcccaggctgaagtgcagtgagtcaagattgagccactgcactccagcctgggtgacagcgcgagactccatctcag

SEQ ID NO: 7253 - DNA, 348 bp, Homo sapiens
  misc_feature (1)..(348): n=a,t,g or c
gmaaatgcatggcaaagtwtcgtmttctcgtagactatctagcatgcagagtgtagtgtgttgaaacggtgtatgacattgctgtatcaaagttgtaaaattaagcattatttattgaaaactatgtatttttttgtaaaaacctgatcacatagagaatatcagtggcttgtgcttgtgcttcgrtctaaccagcttcttgacccacccccccytggtatgcagtgttaatgctcagggttgaaatagtacactccaatgtctcttttgcaagagtttttcacagrggattacatttgttcaaaagactctaataaaattgtgtgatcaatcttcaaaaaaaaaaaa

SEQ ID NO: 7254 - DNA, 428 bp, Homo sapiens
  misc_feature (1)..(428): n=a,t,g or c
ggagcccatttgaggggcagagggcggacagtatatggtgcagtccgagcggtacctccaacagccatccccgcctatccaggggtggatatgcagcctacagatatgcacagcctgctactgcaaccgcagccaccgctgctgcagccgctgcagccgcttacagtgacggttatggcagggtgtacacagccgacccytaccatgcccttgcccctgccgctagctatggagttggcgctgtggcgagtttataccgaggtggctacagccgatttgccccctactgaagtgacgtgagacccctgaaatgggactttctgtactcttggaagctgggctccttaaaggaggcctctagtgacacctttatctccatgccctcttagagccaaagagcttcccaaaggaattttccagaattccta

SEQ ID NO: 7255 - DNA, 374 bp, Homo sapiens
  misc_feature (1)..(374): n=a,t,g or c
cagtaacatagagcttttagcggntcaagaaggaataaaagttcttgaaacactggttgctcttggtgaagaacaaaacagagtccagctacttgctcttttagttcccactttgatatcttacctgctggatgaaaattcttntgcctcagcaagttcagcttccaaagatcttcatgagtgtgcactccagaatttaatgcatatnggncctctgtatccacatgcttncaagacagtaatgggggctgctcctgagttgaaagtgcgtctagaaactgccgttcgagcaagccaagcgagcaaagctaaagcggttgtcagacaaccagcccccgccatacattctgcaccancaatttaagctaaaaaca

SEQ ID NO: 7256 - DNA, 424 bp, Homo sapiens
  misc_feature (1)..(424): n=a,t,g or c
gtatataggttttatctctggttgaatccctcgaacaatagacagtacctttcncccccctttcatggcccattttattgtctgcctttcagtactaagtatgaccgctcctatctcagatcttaataaaaagaaaaaaaaaaacgcatncaggttaaattnggccttaatttaatatacttgttagcaagcgtgtgtgacagagagtggggaaagctacatcattgaatatttggataaactttaccgacttgagtttggtttattttncccttttcctaaattaactagcactgactgtaatttatttccctgtttcacgtctctcccttccattctgcaggaggttttagctatttgggatcggggaccatcagttttggaacttttagagagtgtttcttgactcttaaaaccccttttt

SEQ ID NO: 7257 - DNA, 409 bp, Homo sapiens
  misc_feature (1)..(409): n=a,t,g or c
ttcatataggaataaataaaaaggaggaccacttgtgagccaacctaggaaggacttgccagaaagtagcagctcctgctnanaaatacagtgccttcaaaatgattctctgtgtgaattgcatgcaatttcatgtaaccataaagtgtaacctgtatgtgcatgacatgtgtctagaatgtgtaaagttaggattcagcaggaaggggcctggcctgttcactgtggtggatcagtggacctgctgaagtcactggactcatgtgacttaggtttgcagcatcagacccctgtgtttgcattaagtgggccacatcgttgaaatcggatccaatctctccctcagctttcttttcctactttgcagctttgctgggttttaactgctttcattcttctggcttcttgg

SEQ ID NO: 7258 - DNA, 398 bp, Homo sapiens
  misc_feature (1)..(398): n=a,t,g or c
gcgttgacaaatcagatgatcagctttatccaagaaagaagactagtannttgtctgcctcctatagcagaaaggtgaatgtacaaactgttggtggccctgaatccatctgaccagctgctggtatctgccaggactggcagttctgatttagttaggagagagccgctgataggttaggtctcatttggagtnttggtggaaaggaaactgaaggtaattgaatagaatacgcctgcatttaccagccccagcaacacaaagaatttttaatcacacggttctcaaattcacaaatgttaacatgggtaagtgatccatgggtgtgcgagtgggtcaattnagtagtacagtgggaacctgtttaaatggcataacctaatttttcccnggggant

SEQ ID NO: 7259 - DNA, 500 bp, Homo sapiens
  misc_feature (1)..(500): n=a,t,g or c
ctcggcgtggtgtagctccggtagaaggcccccaacccctcggtcctccacaccgtccggatgcagctgattgctgaccggtgctgcgagttgtacatctgcaagcgctgcttcaccacttctgctggattcattaccgcatcgtggagcagggtggccatactcccagctatccctgcaaaacaaactccagaaaattaccctctgcgatcgggtgttctcaggaagttcctggaacctaaaatcagacggaacccaggacttagctttctaagaagcaaaatgtactaccagctccgcccaggtgagcactgactcttaaaaccctgaagtgatggtggaaatatgataaaaatggggatggttaatttaggcacactcaaccacattttaatcttgcaaaaacatggttttctttcttgtagttcaacctgggaaaaagttaaacnggcaagtgtttggtggttcccagaanccacacacctgggttttttccatgt

SEQ ID NO: 7260 - DNA, 442 bp, Homo sapiens
  misc_feature (1)..(442): n=a,t,g or c
ggcagagctgaaacttattccaagctttcaaaataatcttttaagaagccaggattctccggtctggaatttctgagtgagtcctttttttatggtgtcctccctctgtgaatgtacaggcggaactgtacgaacagctcccttccatccatttttaactctttcggaaataacacctcacagcagcttcgtgcttttgtacagacctttgtaacaagtgtacagaaaactcattttgtttgagaaacaggagttgatgaacccatcatgctggtttttctctgaggcacaaagttttaggctgtacacagccagccttggggaatctcgttgagncgttcggcgtgggatccacggggnccagggncaccctgncgggagcgcccancacgcattccacntcgggattncagtggggtgaaggacagaactctgtagtttn

SEQ ID NO: 7261 - DNA, 11893 bp, Homo sapiens
  misc_feature (1)..(11893): n=a,t,g or c
ccgcgcgtccctgtgcgtccccgggtccctgcgggcgggcgggcgcggtcgccgccgagcaacccggcctgcgcccggcacgactgtagatgtcaggctttgcccggggagccgagcggcagcggggctgtgagtttcaaattaaccttccgctttgttgctgtgtaatgtggatccccgaaggccccccgccccgcccgccccccttccccgggcggtgcgcgctgcaaactgcgagttgggcttcatttacataaagcgattccgggcgggcggcggaagaggaggaggcggcggcggcgggcaggccggggacccggacgccagcgccgcgccccgtgggtgaatccccgccgcgtcccggggacctccctccggggacgggccgaccgccagccctgccgccaccatgagctcccctcccctgtctccgggccccctgctcctgaccagagccacctccgagtcctggggccagcgggaggtggggagcataccgcctggggtgggtgagctcggggctcgggtgccactggaatttcccgttgttgcgcatggcggcgcggcccccggacctgcaagtgccgcctccctccggaggtgcgcggaggcttggtgtgccaggtccgagcctccgtactgggtgcaatgaaagctccacgcaggccttaccatggaaggctgtgactcgcccgtcgtctcggggaaggacaatgggtgcggtatccctcagcaccagcaatggactgaactcaacagcacccacctccctgacaaacccagtagcatggaacagtccacaggcgagagccacgggcccttggacagcctgagggcccccttcaatgagcgcctcgcggagagcaccgcgtcggccgggccccccgccgagcccgccagcaaggaggtcacctgcaacgaatgttcggcctcctttgccagcctccagacctacatggagcaccactgccccagcgcgcgccccccgccacccctgagagaggagagcgctagcgacaccggtgaggagggggacgaggagagtgacgtggagaacctggccggggagatcgtctaccagccggacggctccgcatacattgtggagagcctgagccagctgacccagggcgggggcgcctgtgggagtggcagtggcagtgggcctctcccctcgcttttcctgaactctctccctggcgcggggggcaagcaaggggacccttcgtgtgctgcacccgtgtacccgcagatcatcaacactttccacatagcctcatccttcgggaaatggtttgagggcccagaccaggctttcccgaatacctcagccctggcggggctcagccccgtcctgcacagcttccgcgtgtttgacgtgcgacacaaaagcaacaaggattacctgaacagcgacggttctgccaaaagctcctgcgtatccaaagatgttcccaacaatgtggacctgtccaaattcgatggctttgtgctctatggcaagaggaagcccatcctgatgtgtttcttgtgcaaactctcctttgggtacgtccgttcgtttgtgacccacgcggtgcatgaccatcgaatgaccctgagcgaagacgagcggaaaattcttagcaataagaacatctccgctatcatccaagggatcggcaaagacaaggaaccccttgtaagttttctggaaccaaaaaacaaaaactttcaacaccctttagtttccacagctaacctcataggccccggacacagtttttatggtaaatttagtggcattcgaatggaaggggaggaagctctcccagcgggctccgccgctggccccgagcagccccaggctggtctcttgacccccagcaccctgttgaaccttggcgggctcaccagctcggtactgaagacccccattacctcagtccccctgggggctctggcttccagtcctaccaaatcctcagagggcaaggactctggggcggcagaaggagagaagcaggaagtgggcgacggggattgcttctctgagaaggtagagccagccgaagaggaggcggaggaggaagaggaggaggaagaggcggaggaggaggaggaagaagaggaggaggaagaagaggaggaggaagacgagggttgcaaaggactctttccaagcgagttggatgaggaactggaggacaggccccatgaggagcctggggccgcagcaggtagtagcagcaaaaaggaccttgctctctcaaaccaaagcatttctaactcccccttaatgcctaacgtgctccagaccctgtcgaggggcacagcttctactagttctaattctgcttcttcctttgttgtctttgatggtgcgaacaggaggaatcgtttaagctttaacagtgagggcgtcaggaccaatgtggcagagggcggcaggaggctggacttcgctgacgaaagtgccaataaagacaatgccacagcaccagaaccaaatgaaagtacagagggtgacgatgggggcttcgttccccatcaccagcacgctggctccctctgcgagcttggggttggggagtgcccctcggggagtggcgtggagtgccccaaatgcgacacggtcctgggctcctcccgctcgctgggcggccacatgaccatgatgcattctcgtaactcgtgtaagacactcaagtgccccaagtgcaactggcactataagtaccagcagaccctggaggcacacatgaaggagaagcacccggagccggggggctcctgtgtctactgcaaaagcgggcagccccacccccggctggcacgaggcgagagctacacgtgtggttacaagcctttccgctgcgaggtgtgtaactactccacaactaccaaaggcaacctcagtattcatatgcagtctgacaagcatctcaacaacatgcagaacctacagaatggagggggggagcaggtcttcatccacactgccggggcggcggcggcggcggcggctgcggcggcggcggcagccaatatcagtagctcctgcggggccccctcgcccaccaaaccaaaaaccaaacccacctggcggtgcgaggtgtgtgattatgagaccaacgtggccaggaacctccgcattcacatgaccagtgagaagcacatgcataacatgatgttactgcaacagaacatgacccagatccaacacaaccaccaccgggtcctcggcagcctgccctcacccgccgaggccgagctctaccaatactacctggcccagaacatgaacctgcccaacctgaagatggacagtgctgcctcggacgcccagttcatgatgagcggattccagctggatcccgccgggcccatggccgccatgacgcctgctctagtgggcggtgagatccccctagacatgcggctcgggggcgggcagctggtgtcagaggagctgatgaacctgggcgagagcttcatccagaccaacgacccgtcgctgaagctcttccagtgcgccgtctgcaacaagttcacgacggacaacctggacatgctgggcctgcacatgaacgtggagcgcagcctgtcggaggacgagtggaaggcggtgatgggggactcataccagtgcaagctctgccgctacaacacccagctcaaggccaacttccagctgcactgcaagacagacaagcacgtgcagaagtaccagctggtggcccacatcaaggagggcggcaaggccaacgagtggaggctcaagtgtgtggccatcggcaaccccgtgcacctcaagtgcaacgcctgtgactactacaccaacagcctggagaagctgcggctgcacacggtcaactccaggcacgaggccagcctgaagttgtacaagcacctgcagcagcatgagagtggtgtagaaggtgagagctgctactaccactgcgttctgtgcaactactccaccaaggccaagctcaacctcatccagcatgtgcgctccatgaagcaccagcgaagcgagagcctgcgaaagctgcagcggctgcagaagggccttccagaggaggacgaggacctggggcagatcttcaccatccgcaggtgcccctccacggacccagaagaagccattgaagatgttgaaggacccagtgaaacagctgctgatccagaggagcttgctaaggaccaagagggcggagcatcgtccagccaagcagagaaggagctgacagattctcctgcaacctccaaacgcatctccttcccaggtagctcagagtctcccctctcttcgaagcgaccaaaaacagctgaggagatcaaaccggagcagatgtaccagtgtccctactgcaagtacagtaatgccgatgtcaaccggctccgggtgcatgccatgacgcagcactcggtgcaacccatgcttcgctgccccctgtgccaggacatgctcaacaacaagatccacctccagctgcacctcacccacctccacagcgtggcacctgactgcgtggagaagctcattatgacggtgaccacccctgagatggtgatgccaagcagcatgttcctcccagcagctgttccagatcgagatgggaattccaatttggaagaggcaggaaagcagcctgaaacctcagaggatctgggaaagaacatcttgccatccgcaagcacagagcaaagcggagatttgaaaccatcccctgctgacccaggctctgtgagagaagactcaggcttcatctgctggaagaaggggtgcaaccaggttttcaaaacttctgctgcccttcagacgcattttaatgaagtgcatgccaagaggcctcagctgccggtgtcagatcgccatgtgtacaagtaccgctgtaatcagtgtagcctggccttcaagaccattgaaaagttgcagctccattctcagtaccatgtgatcagagctgccaccatgtgctgtctttgtcagcgcagtttccgaactttccaggctctgaagaagcaccttgagacaagccacctggagctgagtgaggctgacatccaacagctttatggtggcctgctggccaatggggacctcctggcaatgggagaccccactctggctgaggaccataccataattgttgaggaagacaaggaggaagagagtgacttggaagataaacagagcccaacgggcagtgactctgggtcagtacaagaagactcgggctcagagccaaagagagctctgcctttcagaaaaggtcccaattttactatggaaaagttcctagacccttctcgcccttacaagtgtaccgtctgcaaggaatctttcactcaaaagaatatcctgctagtacactacaattctgtctcccacctgcataagttaaagagagcccttcaagaatcagcaaccggtcagccagaacccaccagcagcccagacaacaaaccttttaagtgtaacacttgtaatgtggcctacagccagagttccactctggagatccatatgaggtctgtgttacatcaaaccaaggcccgggcagccaagctggaggctgcaagtggcagcagcaatgggactgggaacagcagcagtatttccttgagctcctccacgccaagtcctgtgagcaccagtggcagtaacacctttaccacctccaatccaagcagtgctggcattgctccaagctctaacttactaagccaagtgcccactgagagtgtagggatgccacccctggggaatcctattggtgccaacattgcttccccttcagagcccaaagaggccaatcggaagaaactggcagatatgattgcatccaggcagcagcaacaacagcagcagcaacagcaacaacaacaacaacaacaacaacaacaagcacaaacgctggcccaggcccaggctcaagttcaagctcacctgcagcaggagctgcagcaacaggctgccctgatccagtctcagctgtttaaccccaccctccttcctcacttccccatgacaactgagaccctgctgcaactacagcagcagcagcacctcctcttccctttctacatccccagtgctgagttccagcttaaccccgaggtgagcttgccagtgaccagtggggcactgacactgactgggacaggcccaggcctgctggaagatctgaaggctcaggttcaggtcccacagcagagccatcagcagatcttgccgcagcagcagcagaaccaactctctatagcccagagtcactctgccctccttcagccaagccagcaccccgaaaagaagaacaaattggtcatcaaagaaaaggaaaaagaaagccagagagagagggacagcgccgaggggggagagggcaacaccggtccgaaggaaacactgccagatgccttgaaggccaaagagaagaaagagttggcaccagggggtggttctgagccttccatgctccctccacgcattgcttcagatgccagagggaacgccaccaaggccctgctggagaactttggctttgagttggtcatccagtataatgagaacaagcagaaggtgcagaaaaagaatgggaagactgaccagggagagaacctggaaaagctcgagtgtgactcctgcggcaagttgttttccaacatcttgattttaaagagtcatcaagagcacgttcatcagaattactttcctttcaaacagctcgagaggtttgccaaacagtacagagaccactacgataaactgtacccactgaggccccagaccccagagccaccaccacctccccctccaccccctccacccccacttccggcagcgccgcctcagccggcgtccacaccagccatccccgcatcagccccacccatcacctcacctacaattgcaccggcccagccatcagtgccgctcacccagctctccatgccgatggagctgcccatcttctcgccgctgatgatgcagacgatgccgctgcagaccttgccggctcagctacccccgcagctgggacctgtggagcctctgcctgcggacctggcccaactctaccagcatcagctcaatccaaccctgctccagcagcagaacaagaggcctcgcaccaggatcacagatgatcagctccgagtcttgcggcaatattttgacattaacaactcccccagtgaagagcaaataaaagagatggcagacaagtccgggttgccccagaaagtgatcaagcactggttcaggaacactctcttcaaagagaggcagcgtaacaaggactccccttacaacttcagtaatcctcctatcaccagcctggaggagctcaagattgactcccggcccccttcgccggaacctccaaagcaggagtactggggaagcaagaggtcttcaagaacaaggtttacggactaccagctgagggtcttacaggacttcttcgatgccaatgcttacccaaaggatgatgaatttgagcaactctctaatttactgaaccttccaacccgagtgatagtggtgtggtttcagaatgcccgacagaaggccaggaagaattatgagaatcagggagagggcaaagatggagagcggcgtgagcttacaaatgatagatacattcgaacaagcaacttgaactaccagtgcaaaaaatgtagcctggtgtttcagcgcatctttgatctcatcaagcaccagaagaagctgtgttacaaggatgaggatgaggaggggcaggacgacagccaaaatgaggattccatggatgccatggaaatcctgacgcctaccagctcatcctgcagtaccccgatgccctcacaggcttacagcgccccagcaccatcagccaataatacagcttcctccgctttcttgcagcttacagcggaggctgaggaactggccaccttcaattcaaaaacagaggcaggcgatgagaaaccaaagctggcggaagctcccagtgcacagccaaaccaaacccaagaaaagcaaggacaaccaaagccagagctgcagcagcaagagcagcccgagcagaagaccaacactccccagcagaagctcccccagctggtgtccctgccttcgttgccacagcctcctccacaagcgccccctccacagtgccccttaccccagtcgagccccagtccttcccagctctcccacctgcccctcaagcccctccacacatcaactcctcaacagctcgcaaacctacctcctcagctaatcccctaccagtgtgaccagtgtaagttggcatttccgtcatttgagcactggcaggagcatcagcagctccacttcctgagcgcgcagaaccagttcatccacccccagtttttggacaggtccctggatatgcctttcatgctctttgatcccagtaacccactcctggccagccagctgctctctggggccatacctcagattccagcaagctcagccacttctccttcaactccaacctccacaatgaacactctcaagaggaagctggaggaaaaggccagtgcaagccctggcgaaaacgacagtgggacaggaggagaagagcctcagagagacaagcgtttgagaacaaccatcacaccggaacaactagaaattctctaccagaagtatctactggattccaatccgactcgaaagatgttggatcacattgcacacgaggtgggcttgaagaaacgtgtggtacaagtctggtttcagaacacccgagctcgggaaaggaaaggacagttccgggctgtaggcccagcgcaggcccacaggagatgccctttttgcagagcgctcttcaaagccaagactgctcttgaggctcatatccggtcccgtcactggcatgaagccaagagagctggctacaacctaactctgtctgcgatgctcttagactgtgatgggggactccagatgaaaggagatatttttgacggaactagcttttcccacctacccccaagcagtagtgatggtcagggtgtccccctctcacctgtgagtaaaaccatggaattgtcacccagaactcttctaagcccttcctccattaaggtggaagggattgaagactttgaaagcccctccatgtcctcagttaatctaaactttgaccaaactaagctggacaacgatgactgttcctctgtcaacacagcaatcacagataccacaactggagacgagggcaacgcagataacgacagtgcaacgggaatagcaactgaaaccaaatcctcttctgcacccaacgaagggttgaccaaagcggccatgatggcaatgtctgagtatgaagatcggttgtcatctggtctggtcagcccggccccgagcttttatagcaaggaatatgacaatgaaggtacagtggactacagtgaaacctcaagccttgcagatccctgctccccgagtcctggtgcgagtggatctgcaggcaaatctggtgacagcggagatcggcctgggcagaaacgttttcgcactcaaatgaccaatctgcagctgaaggtcctcaagtcatgctttaatgactacaggacacccactatgctagaatgtgaggtcctgggcaatgacattggactgccaaagagagtcgttcaggtctggttccagaatgcccgggcaaaagaaaagaagtccaagttaagcatggccaagcattttggtataaaccaaacgagttatgagggacccaaaacagagtgcactttgtgtggcatcaagtacagcgctcggctgtctgtacgtgaccatatcttttcccaacagcatatctccaaagttaaagacaccattggaagccagctggacaaggagaaagaatactttgacccagccaccgtacgtcagttgatggctcaacaagagttggaccggattaaaaaggccaacgaggtccttggactggcagctcagcagcaagggatgtttgacaacacccctcttcaggcccttaaccttcctacagcatatccagcgctccagggcattcctcctgtgttgctcccgggcctcaacagcccctccttgccaggctttactccatccaacacagctttaacgtctcctaagccgaacttgatgggtctgcccagcacaactgttccttcccctggcctccccacttctggattaccaaataaaccgtcctcagcgtcgctgagctccccaaccccagcacaagccacgatggcgatgggccctcagcaacccccccagcagcagcagcagcagcagcaaccacaggtgcagcagcctcccccgccgccagcagcccagccgccacccacaccacagctcccactgcaacagcagcagcaacgcaaggacaaagacagtgagaaagtaaaggagaaggaaaaggcacacaaagggaaaggggaacccctgcctgtccccaagaaggagaaaggagaggcccccacggcaactgcagccacgatctcagccccgctgcccaccatggagtatgcggtagaccctgcacagctgcaggccctgcaggccgcgttgacttcggaccccacagcattgctcacaagccagttccttccttactttgtaccaggcttttctccttattatgctccccagatccctggcgccctgcagagcgggtacctgcagcctatgtatggcatggaaggcctgttcccctacagccctgcactgtcgcaggccctgatggggctgtccccaggctccctactgcagcagtaccagcaataccagcagagtctgcaggaggcaattcagcagcagcagcagcggcaactacagcagcagcagcagcaaaaagtgcagcagcagcagcccaaagcaagccaaaccccagtcccccccggggctccttccccagacaaagaccctgccaaagaatcccccaaaccagaagaacagaaaaacaccccccgtgaggtgtcccccctcctgccgaaactccctgaagagccagaagcagaaagcaaaagtgcggactccctctacgaccccttcattgttccaaaggtgcagtacaagttggtctgccgcaagtgccaggcgggcttcagcgacgaggaggcagcgaggagccacctgaagtccctctgcttcttcggccagtctgtggtgaacctgcaagagatggtgcttcacgtccccaccggcggcggcggcggtggcagtggcggcggcggcggcggtggcggcggcggcggcggcggcggctcgtaccactgcctggcgtgcgagagcgcgctctgtggggaggaagctctgagtcaacatctcgagtcggccttgcacaaacacagaacaatcacgagagcagcaagaaacgccaaagagcaccctagtttattacctcactctgcctgcttccccgatcctagcaccgcatctacctcgcagtctgccgctcactcaaacgacagcccccctcccccgtcggccgccgccccctcctccgcttccccccacgcctccaggaagtcttggccgcaagtggtctcccgggcttcggcagcgaagcccccttcttttcctcctctctcctcatcttcaacggttacctcaagttcatgcagcacctcaggggttcagccctcgatgccaacagacgactattcggaggagtctgacacggatctcagccaaaagtccgacggaccggcgagcccggtggagggtcccaaagaccccagctgccccaaggacagtggtctgaccagtgtaggaacggacaccttcagattgtaagctttgaagatgaacaatacaaacaaatgaatttaaatacaaaaattaataacaaaccaatttcaaaaatagactaactgcaattccaaagcttctaaccaaaaaaca

SEQ ID NO: 7262 - DNA, 958 bp, Homo sapiens
  misc_feature (1)..(958): n=a,t,g or c
aaaagaaaaggttagaaagatgagagatgataaagggtccatttgaggttaggtaatatggtttggtatccctgtagttaaaagtttttgtcttattttagaatactgtgatctatttctttagtattaatttttccttctgttttcctcatctagggaaccccaagagcatccaatagaagctgtgcaattatgtaaaattttcaactgtcttcctcaaaataaagaagtatggtaatctttacctgtatacagtgcagagccttctcagaagcacagaatatttttatatttcctttatgtgaatttttaagctgcaaatctgatggccttaatttcctttttgacactgaaagttttgtaaaagaaatcatgtccatacactttgttgcaagatgtgaattattgacactgaacttaataactgtgtactgttcggaaggggttcctcaaattttttgactttttttgtatgtgtgttttttctttttttttaagttcttatgaggaggggagggtaaataaaccactgtgcgtcttggtgtaatttgaagattgccccatctagactagcaatctcttcattattctctgctatatataaaacggtgctgtgagggaggggaaaagcatttttcaatatattgaacttttgtactgaatttttttgtaataagcaatcaaggttataattttttttaaaatagaaattttgtaagaaggcaatattaacctaatcaccatgtaagcactctggatgatggattccacaaaacttggttttatggttacttcttctcttagattcttaattcatgaggagggtgggggagggaggtggagggagggaagggtttctctattaaaatgcattcgttgtgttttttaagatagtgtaacttgcttaaatttcttatgtgacattaacaaataaaaaagctcttttaatattagataa

SEQ ID NO: 7263 - DNA, 7011 bp, Homo sapiens; identical to SEQ ID NO: 443
  misc_feature (1)..(7011): n=a,t,g or c

SEQ ID NO: 7264 - DNA, 676 bp, Homo sapiens
  misc_feature (1)..(676): n=a,t,g or c
caagtctgcaggaaactctggaatcaggaagaaaagctatgttcatactctaaatctggatattaaaattggaagagacttcaaagactgtcaagtggaaagctatcatttcctaaattaaggaacttaggtcaaagttaaatgaaaaagacctaaaaacagaaccaaagacagcctctagatttcttaccctcaagtctcctgttagcatactgcctatacacacagacacaccctctgccacactgctctcttccttccagaagcttggttctactgtaagcaacagctccttcatgggctgagaaggggaaaccaggatctccccaaccaagggcctatacttttatttttcaactctattaactgaactatgcttggagagagccctgaatcctttaactttaatgccatcttaggcctggaagttagagtgagggaaatgagcttggcttctgggactgtgtcaagttgaattttctgncatttaatttcagatcctagctcatcatcagtggagtccagcctacttacttggtactaataaacctttcctaaaaggtttcaancgccttgggtaaagctccagaaatggggcaatgccnagtgactggccaatattgtggctggnctaatgncactgnactgnccccttaaatggnaaattntatggatt

SEQ ID NO: 7265 - DNA, 411 bp, Homo sapiens; identical to SEQ ID NO: 3586
  misc_feature (1)..(411): n=a,t,g or c

SEQ ID NO: 7266 - DNA, 418 bp, Homo sapiens
  misc_feature (1)..(418): n=a,t,g or c
aaaccatggcttcaaggtgggcatgaagctggaggccgtggacctgatggagccccggctcatctgtgtggccacggtgaaacgagtggtgcatcggctcctcagcatccactttgacggctgggacangaggtacgaccagtgggtggactgcgagtccccagacatctaccccgtcggctggtgtgagctcaccggctaccagctccagcctcctgtggccgcagaaccggcacanccgctgaaggccaaagaggccacaaagaagaaaaagaaacagtttgggaagaaaatcattgctgtgcgtgtgaaggaagagcatctagacgtggcctcgcccgacaaggctttcaagtccagagctgcctgttttccgttcgagaacattcaagcaggaaacagacgattgagcnttcct

SEQ ID NO: 7267 - DNA, 503 bp, Homo sapiens
  misc_feature (1)..(503): n=a,t,g or c
cttctctgaaatgggtaaaggacaaattgtgtaaaaaaacctatgcactatagaagggaatagtaaccatttcttttgtctctctgtttctgttctgactgagaacctgcagccatttcttgttacatgaaaacaaaatgctacttgttacctctattttttgttactatacaattatgaaatgtaatgtaagacaccaacagaaatgatatacctgtaactgtacctatcaggactatacctcatttacagtcagaaagcttactgggatgtcaggaaatgatacagggttggttctcatttcgtgccgaaatgagacaggaaattcagtgacgaaggtgcgttgtaggggtattgatgtgccccgggtagtgccagcagagtagggggaaactgcttttgcttaaaaantactctttgacatggttgtttcnttttacaaaaaatttcctttntttaccccgggcctcaccccggccctgtgtggttgggnttttgtgggg

SEQ ID NO: 7268 - DNA, 336 bp, Homo sapiens
  misc_feature (1)..(336): n=a,t,g or c
ctaaaactcagcagttcataggggtagagggaaataacctgagaaagccgagttaaatcttaaaatttttactataaggatagagatgatacaagtgaactctgcaaaatagttttgtgaaattaaacaaaaaaatctactcttaatgtatattatttcatatttgtttaacaaaagcagcttgatgcctttgttctggattatacattaagaacaagcattattttaattatgtagtaacatttactatgactttgaagccagatttcaaaaatctggctttgtttaaattaattgggaaacactcttctatttaagttaggtatttaaaaaaag

SEQ ID NO: 7269 - DNA, 370 bp, Homo sapiens
  misc_feature (1)..(370): n=a,t,g or c
ccatttaaacttgcagagtgcaaacttgcaataattcattgtgccggttattcagaccctatattggtgcagacactttggcaagatatcatagagaaagaattgagtgacagtgtgacattgagctcctcggatagaatgcatgctcttagtctcaagattgttctccttggcaaaatttatgctggcacaccacgcttctttcctttagattttattgtacagtttttagaacagcaggtttgtactttgaactgggatgtgggcttcgtaatacagacaatgaatgaaattggagtaccattgcctagactactagaagtttatgatcagttgttcaaatcacgggatccattctgggancagaatg

SEQ ID NO: 7270 - DNA, 463 bp, Homo sapiens
  misc_feature (1)..(463): n=a,t,g or c
natttcggcacgngtccggccaactctagaatctttttaagcaggtcagccaggtatttgcaacttccacaggatgaattgcttgccaagtttctggcactcttgtctggttggaagagtacatccaaagggtacttagtgatcctttgctaagaagttttttgctgtttccgggttacagatttggccatatatttctaaacagcccctgtaaagttgaaagaaaaagtttataacagtgaacttctgaggtttagttactgcaggctttgttgagaagagattgttacagtgtgatttatgggatgatcagggatgactttcccctaggcaaatatttgggatgcctcctgtttgtccaaataggaatgaatgggtgatgggtgatggggaggggatagtttaaacgtttttctctggntagggtttaacttcttaacaggtataatttacatggcccgga

SEQ ID NO: 7271 - DNA, 1903 bp, Homo sapiens
  misc_feature (1)..(1903): n=a,t,g or c
gaattccagcaaatcttcagttggtggtaacacccttaccatgagccagatatgagatccctaatattctgtgatccctgatgagtgaagggaacaaggatatgtgtaggaggggagctcggtatgactaagggtcaagagaaggtgaggccagagagagcctgagctgagatctgctgaaacagctcctaaaatgaaaacaaggttggggccagaattttttctggatagtagttatgttttcctgccaacgctcaagtcctacacaaagacaaatgacaatcaatgtaaatgtcaaataagatcgttagcctgagtaatcataaccaatctgtatgacacctttttaacaggaggcctcattcttcttttccccaaccagaattaagagaaaaaaagtgaatatggtttttgctcacagaatggataacagcaagccacatttgattattcctacacttctggtgcccctccaaaaccgcagctgcactgaaacagccacacctctgccaagccaatacctgatggaattaagtgaggagcacagttggatgagcaaccaaacagaccttcactatgtgctgaaacccggggaagtggccacagccagcatcttctttgggattctgtggttgttttctatcttcggcaattccctggtttgtttggtcatccataggagtaggaggactcagtctaccaccaactactttgtggtctccatggcatgtgctgaccttctcatcagcgttgccagcacgcctttcgtcctgctccagttcaccactggaaggtggacgctgggtagtgcaacgtgcaaggttgtgcgatattttcaatatctcactccaggtgtccagatctacgttctcctctccatctgcatagaccggttctacaccatcgtctatcctctgagcttcaaggtgtccagagaaaaagccaagaaaatgattgcggcatcgtggatctttgatgcaggctttgtgacccctgtgctctttttctatggctccaactgggacagtcattgtaactatttcctcccctcctcttgggaaggcactgcctacactgtcatccacttcttggtgggctttgtgattccatctgtcctcataattttattttaccaaaaggtcataaaatatatttggagaataggcacagatggccgaacggtgaggaggacaatgaacattgtccctcggacaaaagtgaaaactatcaagatgttcctcattttaaatctgttgtttttgctctcctggctgccttttcatgtagctcagctatggcacccccatgaacaagactataagaaaagttcccttgttttcacagctatcacatggatatcctttagttcttcagcctctaaacctactctgtattcaatttataatgccaattttcggagagggatgaaagagactttttgcatgtcctctatgaaatgttaccgaagcaatgcctatactatcacaacaagttcaaggatggccaaaaaaaactacgttggcatttcagaaatcccttccatggccaaaactattaccaaagactcgatctatgactcatttgacagagaagccaaggaaaaaaagcttgcttggcccattaactcaaatccaccaaatacttttgtctaagttctcattctttcaattgttatgcaccagagattaaaaagctttaactataaaaacagaagctatttacatatttgttttcactcaactttccaagggaaatgttttattttgtaaaatgcattcatttgtttactgtagtttttgtgggttttattttacttgctttttatgttttaggaaaagcgttcactttgaactttagccaacagtccttttactattaatatattagttacatgcataaaaaa

SEQ ID NO: 7272 - DNA, 5181 bp, Homo sapiens
  misc_feature (1)..(5181): n=a,t,g or c
ctgcagcggtccctctgggctgatcttccactctgaccttcagtaagtcctaaaactttccccggagtggccaggagataattcgccacattctgcaaacgtttccagggaagagcctcttaacctttgggggaagaacttgcggacaaagttacaaacgaacgcagtctatctcccgcgccatgaacggaatgatggctgtaactggtcatctaaagtcattaatggtctgcgaacaaattcttcctctctgtttcatctttgaataacttcgccacacaccaaccctcagtgctgcgaaagtcatggtgtttatttagatatcgactgagtacttataaaacttaaactttccaatgtaaaagtgaactccttggtaaggactcctggctgcatcaacaaagcaatgtgatgcctgattaatagtgctgattaatgttggctcaggttaatgctcagcctattacagtaattaaattgttcacccatatatcaaacaagagttaatgaaaaataatttatttagaacgtcgaggctttctcatagattgttcaaagacctatgatagcctttatgggtcacttgtaagagtaactggtggtagcagtcctcagcaacaaaaactcgattttaatagaggtctttagatggggaaacagtttatttctgaggctctgtgattgacagcggtagtaatgacacgtttcagaatgtgaaaagtacttggtcgataaaatgatatacacaaggggcagctgatggctgttcctacagaacgccattgaattttgattcttagttcttgtcaaggggtcattttaatcagaaagttaaacttttgggacaagctcccctctttgaaatagaagcattttaggaaatgcacaaataagtgaatgtgaattcaacaaactattaggatttttccactagccaaaatagctcgtttgagttggtgataaagataggtatatttaaaagagcatcatatcttaattatttccactatcttgtcacccgaaaagaaaactgaattgagcggaactttaatctcataaaaaaaattttcatctcaccagaaaggattaacaatatttaaggattttccaaaaacacatttttaaaaagtttatcttaaagtcatctatcattatagtttctattaataagcctcagtagaaatatgtatatgttatgtaatttaagtattttgagattactatgcaaagtgctgactagaatgttcctcctactgagaactatatagccccattatgaacgaacttctgtttttttttttttttttgaggcggagtttcgctcttgttgcccaggctggagtgcagtggcacgatctcggctcactgcaacctccgcatcccgggtccaagcgattctcctgcctcggcctcccgagtagctgggattacaggcgccgcctactaatttttttctatttttagtagagacggggtttcaccatgttggccaggctggtcgaactttttagtagtttctaggtgcaatttttgtgcgtgtatttgggttttcactaaaaatttcaatttcttctccgaattcaattattacgttctttattcccatgacatttgtcagatcgtctcattagagtggcttagtttaactgtcaagtctctagggcattcaatcgcagagaagtgagtaaaacgccagtctcacagcgtttttattaacagatggcggaaaacaaacgtctttggagtaaaaccgaagagaatgggttaaagggtcaataaacaattattatcgtgcttaaattggggggcttcgcatcagatccaatggggggccgctcgcccgatctggaggggctggacacccccaaccgaccccagagcgtcccccaggggccacctcagaggatggggtggttatcccccggctggaaggctcctacaggctgtcgaggggtcaaaccagagtgtcgcgggtgtgcttctgaggttagggtggaggactaattgaggaggctgggaagtctaactcgtgcagcggccctcggtgcagacagccgcgtaattcgggcatcagcctctttggcaagaaatagtgaggtcccctctcctccccactcttctcagctgctgcctccctcctacgggtgaattttctctcccgagaagggctgatttcctaggcttgctttccttccctcggcagcgctctgacgtgcacaccatgtgacaggcccccttctgctataagccgaggaaggtccgccctctcctggactcagccctggcctcgccgagctctgttcttagactctcacccgtcccgcacgttcctggtcgcctggcgttctgattcgcccgcccgggccccgccaccccctcctcagctgacggggcaaaagctgctccgagaggagaaggtcaagtcctccgcccgggccgggccgagcggagcccagggagcgcagcatccgcgcggctaccgcggcggcgcaggagttataaagtcggcgcgcgagactccgccgccacccggcagccccggcgcagctccggcagccgcagtcgcagcgcccccagcgtggcgccccccggccgggcctgccgcccgggacccgggctggggcgcagagggagcccggagcccggcgcccccatgcgccgccccgccgccgccgcgccacagctatgaccctgagcactgagatgtccgatgcctctggcctcgccgaggaaacagacatcgacgtggtgggggagggcgaggacgaagaagacgaggaagaggaggacgacgacgagggcggcggtggcgggccccggctggctgtccccgcgcagcggcggcggcggcggcgctcgtacgccggggaggacgagctggaggatctggaggaggaggaggacgacgatgacatcctgctggccccgcctgctgggggctccccggcgcccccgggcccggccccggcggcgggggcaggagccggtgggggcggcggcggcggcggcgcgggcggcggcgggagcgcgggtagcggcgccaagaacccgctggtgaagccgccctactcgtatatcgcgctcatcactatggccatcctgcagagccccaagaagcggctgacgctgagcgagatctgtgagttcatcagcggccgcttcccctactaccgggagaagttccccgcctggcagaacagcatccgccacaacctctcgctcaacgactgcttcgtcaagatcccccgcgagcccggcaacccgggcaagggcaactactggacgctggacccggagtccgccgacatgttcgacaacggcagcttcctgcgccggaggaagcgcttcaagcggcagccgctgctcccacccaacgccgcggccgccgagtctctgctgctgcgcggcgcgggagccgcagggggcgcgggcgacccggcagccgccgccgcgctcttcccgcccgcgcccccgccgcccccgcatgcctacggctacggcccctacggctgcggctacggcctgcagctgccgccttacgcgccgccctcggccctcttcgccgccgcagcggccgccgccgccgccgccgccttccacccgcactcgcccccgccgcccccgccaccgcacggcgcggccgccgagctggcccggaccgccttcggctaccggccgcacccgctcggcgccgccctacccggccccctgccggcctccgcggccaaggcgggcggcccgggcgcctcagcgctggcgcgctcgcccttctccatcgagagcatcatcgggggcagcttgggcccggccgccgctgccgccgccgccgcgcaggccgccgccgccgctcaggcctcgccctcgccctcgccggtggcggcgccgccagctcccggatccagcggaggaggctgcgcggcgcaggcggccgtgggcccggcggccgcgctcacccgatccctcgtggccgccgcggccgccgccgcctcctcagtctcctcgtccgccgccttggggactctgcaccaagggactgccctgtccagtgtcgagaactttactgctaggatttccaattgttaataacgctatgttagcgcgctcgaggaagaaggtaggaatcccggctccttttctcgtcttggtggttcggtgttttgttcgctcctccaggcgcggcccctctcgacctcgcgcgcccattttcgccgctgcgaattctcggacaaaactgtcaacagcccgggcgcgccttttggctctgcgggtccctctatttatgcaaagccgacctatgctacagccccccaacccccgacctggggtagggaggaagagggtgccggggaagggagtccgccctgtccaggcactagaggctcccttgacgtttggcagatgaaaaacaactaagcctttttgaggtgtagagattctcaggtccaggcgttaaaaaataatggtcaaaagaataatacaaaaatagtaaaggtcttgaagaatgccagcgaagcaattcttttttatttgaggacacttgtctggtgtactttttcatgaaaaggaaaaatggttaacatgtttacacaagaaaaaaagtcaaaattatcatttatttcaacctgtgttttgtatcataacagacgtgtggatttttttgtacttactgcgtattctttacaaggagtattgtaaattttactggcaattattattgtactattctaaatgtaagatttttacactttttcagaaataaaaatgcttaattttcaaagaaaattcaccaaaatgattggcttcagttgtccccttcttagtttttcttttctacttaaaaaaactttctatgtggggtaagcaggaactcaatatagaacagacttaaatactttcagagagaatttaagaacagcatcatgccatgatttttcacttgaacttcctaagtgaaaaccatggtaggagatcagaaattatttttaaatgactacaaataaaataagttactttggtatacattttcagatctgactctatgccattttaaagcgcattgaagtatgttaaaattaaagccacaggtacccaaagataattttataggaactttgcatttcatttttgagcttccttcctcatttaatttccactcagttcacgacaatattatatctgcag

SEQ ID NO: 7273 - DNA, 2738 bp, Homo sapiens
  misc_feature (1)..(2738): n=a,t,g or c
ggcaactccatttccttggactttgagcccagtatagagtaccagtttgtggagcggttggaagagcgctacaaatgtgccttctgccactcggtgcttcacaacccccaccagacaggatgtgggcaccgcttctgccagcactgcatcctgtccctgagagaattaaacacagtgccaatctgccctgtagataaagaggtcatcaaatctcaggaggtttttaaagacaattgttgcaaaagagaagtcctcaacttatatgtatattgcagcaatgctcctggatgtaatgccaaggttattctgggccggtaccaggatcaccttcagcagtgcttatttcaacctgtgcagtgttctaatgagaagtgccgggagccagtcctacggaaagacctgaaagagcatttgagtgcgtcctgtcagtttcgaaaggaaaaatgcctttattgcaaaaaggatgtggtagtcatcaatctacagaatcatgaggaaaacttgtgtcctgaatacccagtattttgtcccaacaattgtgcgaagattattctaaaaactgaggtagatgaacacctggctgtatgtcctgaagctgagcaagactgtccttttaagcactatggctgtgctgtaacggataaacggaggaacctgcagcaacatgagcattcagccttacgggagcacatgcgtttggttttagaaaagaatgtccaattagaagaacagatttctgacttacacaagagcctagaacagaaagaaagtaaaatccagcagctagcagaaactataaagaaacttgaaaaggagttcaagcagtttgcacagttgtttggcaaaaatggaagcttcctcccaaacatccaggtttttgccagtcacattgacaagtcagcttggctagaagctcaagtgcatcaattattacaaatggttaaccagcaacaaaataaatttgacctgagacctttgatggaagcagttgatacagtgaaacagaaaattaccctgctagaaaacaatgatcaaagattagccgttttagaagaggaaactaacaaacatgatacccacattaatattcataaagcacagctgagtaaaaatgaagagcgatttaaactgctggagggtacttgctataatggaaagctcatttggaaggtgacagattacaagatgaagaagagagaggcggtggatgggcacacagtgtccatcttcagccagtccttctacaccagccgctgtggctaccggctctgtgctagagcatacctgaatggggatgggtcagggagggggtcacacctgtccctatactttgtggtcatgcgaggagagtttgactcactgttgcagtggccattcaggcagagggtgaccctgatgcttctggaccagagtggcaaaaagaacattatggagaccttcaaacctgaccccaatagcagcagctttaaaagacctgatggggagatgaacattgcatctggctgtccccgctttgtggctcattctgttttggagaatgccaagaacgcctacattaaagatgacactctgttcttgaaagtggccgtggacttaactgacctggaggatctctagtcactgttatggggtgataagaggacttcttggggccagaactggaggagagcacatttgattatcatattgacctggatttagactcaaagcacatttgtatttgcctttttccttaacgtttgaagtcagtttaaaacttctgaagtgctgtctttttacattttactctgtcccagtttgaaacttaaaactcttagaatattctcttattatttatatttttatatttcttgaaagatggtaagtttcttgaagtttttggggcgtttctcttttactggtgcttagcgcagtgtctcgggcactctaaatattgagtgttatggaggacacagaggtagcagaatcccagttgaaaatgttttgatattttattgtttggcctattgattctagacctggccttaagtctgcaaaagccatctttataaggtaggctgttccagttaagtagtgggtgatgtagttacaaagataatatgctcagtttggacctttttttcagttaaatgctaaatatatgaaaattactatacctctaagtattttcatgaaattcaccagcagtttgcaagcacagttttgcaaggctgcataagaactggtgaatggggtaagcattttcattcttcctgctgaagtaaagcagaaagtactgcatagtatatgagatatagccagctagctaaagttcagattttgttaggttcaaccctatgaaaaaaactattttcataggtcaaaaatggtaaaaaattagcagtttcataagattcaaccaaataaatatatatatacacacacacatacatatacacctatatatgtgtgtatacaaacagttcgaatgtattttggtgacagtaataaatcaatgtgaggatggatagaatttagtatatgatagagaaaatgtcataaatggataaaaggaatttacaacttgaggagaaaacctttacaatttcctatgggtgtcagaagtactctcagcgaaaactgatggctaaaacagtatctactattctctgataactttttttctgagacagagtttcattgtcacccaggctggagtacagtggcatgatctcagctcactgcaaactctgcctccc

SEQ ID NO: 7274 - DNA, 1414 bp, Homo sapiens
  misc_feature (1)..(1414): n=a,t,g or c
gctcagttagggctcttgccactccccatactggcccccatggcttgtctaaataggaccttgtttcaacttttctacttactgtgaccagccaacaggtgacatatttgtacagcacaaacttgccccagatcagcatgtacatgcagcggaaccagaaggggtggttcttgagggaagaaagcacagtgcattagggatatcacatgactaggcagtttctctcagcactcttccttttcacacttgtggctggctacttcatacctgcctgagtcctgctgccagatgccctcaatagtctggcctgattgccttcacaataggcagagaggaataagcagagggcctggagaatattcattcgcctttcccttggagagcctcaagggcagcactgtatttaacttctctactgtttgccttcgttggcaaagtgtttggaatgagcatttggaatgttaagtacagaggggcccatattggattttaatttaaggagagaaacctgcccagaattactgaactgttttcaagcctttcagctgggcaggagcaaaagccagcacttccccccttcccttggtttctgaattccctagaagtgcccaaatgtatcagtcaagagaagaaaataggatggagaatcagaagctgctgtgctctgaggggtcacgtggatgtgataaggcaagctaggagcggctcctagagaaggcaacgggtgctaaatgtgcacctggcacagccctgtgcccgcgaaggttgttcagtgctggctgatgaacatgtcccagcacggctggcattgacaactcacagatctagagcaaaaccaacatgcacttgtagatgatatttcctacttctctgctatctgtagggatccttgcctgtccattttctagctctggtgcagtcatgctgctgctgctttagtagacactcacgtcatagtcttcagtgaggagatagtcttctgtgatgtgggggctgagcagtgtgtagcccactaggtagaaaaggcccagactcaggcgcttgagagcaggaatgatgctggaaaggaacgagtgaagttcctggtcacagagagcagagactattcccttcaccctctgaccttcagttatggagaggagtgtttaggggtgtggttgtctacctggaatgggatgagaagctctgctgcccaaagtgtttcctgtttcagggaaagatttctatggctggctatgaggaatggggactgcaaacctcttaagagttgtaggaaagtcagggcagcagacagtggaccagtcttgtgtttacccctcagggatgctactgatctcaaggtcttgccaggtctcacaatctccattgggactgaaaacccagtggaggtaagataataaaaataaccactttg

SEQ ID NO: 7275 - DNA, 475 bp, Homo sapiens
  misc_feature (1)..(475): n=a,t,g or c
gagaaaatgaggttaatgaagaggtatcagttaaatatccccttcttctcaccctgccaaaattagcagttggatttttggaaactctggaatattctgggtcattttgttttgtatgtttgttgtttttccgtcttccaaaggtgaaagctatgatacagttccacttaaattttagtgttttcttactcagctcaagcattaatttttgattaagtcttaatctgcatgacctgtgaatctgaatccatcatctccctttcctgccagcttttctacaaacattgaaatatgttatttggtcagcacttatttcctaggttcacagccttgggaggttgtggcatgtcctcccagtctggctgggaagagaccaagctgtaccatccaaatgcttccctgggtcttgatgatctcttccagagtcgatctgaagtgggccttttctgganccttccccttctttccccttgga

SEQ ID NO: 7276 - DNA, 551 bp, Homo sapiens
  misc_feature (1)..(551): n=a,t,g or c
ctagcagcaagggccatagctgtgcagaaaggaagcattggaaacttgataagcttcctagaggatggggtcacgatggcccagtaccagcagagccagcacaacctcatgcacatgcagcccccgcccctggaaccacctagcgtagacatgatgtgcagggcggccaaggctttgctagccatggccagagtggacgaaaaccgctcggaattccttttgcacgagggccggttgctggatatctcgatatcagctgtcctgaactctctggttgcatctgtcatctgtgatgtactgtttcagattgggcagttatgacataagtgagaaggcaaccatgtgtgagtgaagattagagggtcacatataactggctgtttctgtcttgtttatccagcgtaggaagaaggaaaagaaaactttgctcctctgcccatnactattncaattgggaattaaaganataattaatttgacagttatgaattaatattntgctgtgtgataagtcaccttgggttttttcccttttttaccaagttntgcta

SEQ ID NO: 7277 - DNA, 415 bp, Homo sapiens
  misc_feature (1)..(415): n=a,t,g or c
tatttattaaaaacaaaataatgcaagttctgttaaagtaacaatatatacaccaagataaatatttggaattgtggaaacagaaatagtaaaaatttcaaattttttctcaatatcttaatgacttaaataatttagcttttttcaggcattttttgttaaaaataaacttacttaattttcaacttaggtcaatgtgcttttttgctttttttaaagacaaaaattagtaaaaatggcaggtactaggtttgcactagctaaaaaaataatgtttacagttgtctacgatgtaacaattttaaaaacatacaaattcagtatgtagtatgnaaattccattaaaaaaaaccccataaggaacctatgcccccataaaaaatataaatgccacctcccattaattatatggaat

SEQ ID NO: 7278 - DNA, 910 bp, Homo sapiens
  misc_feature (1)..(910): n=a,t,g or c
gnnnnnnnnnnnnnnngnnnnntggcttnatcatangggnantacttcatcttctctgcataaaaattgtggcacacaatgcttattcactagtgtgtcccacccgccagccccacagatgactggaggaaggaggggaaatgtgtagaaagaggcttcgccaccacttgttcccacgagaatatgtcacttgcccagataaaactgggcggcagccagagttccctgaagtgggaagtcagagctccatgcacacagtgtcttcagaaggtgaaaataaatatttccctgtgctccttttactcaacccctggggtatctaatcttgccaggtcttggccagttgagattctgttccacctgcctgcctggccctttcctccattaccacccagactgctcgcctcctggggattctcaggggctccattatggnttgatttactccacgtgcagaagtcttggagtggacctaggaggtagggtgggatatttnnnnncaattagggatacaggtcatgncaacccatccnangtgagtagattcaagtttggntttacangtngattganaaannngggnntnnncnngnttnantgcnaaannnnnnnnnnccagnnnnntnnnaaannnnnnnnnnnnnnnnnnnnnnnaannnnnnnnnnnnnnnnnnnnnnannnnnnnnnnnnnnnnnnnnnnnnnnnnnnnnnnnnnnnnnnnnnnnnnnnnnnnnnnnnnnnnnnnnnnnnnnnnnnnnnnnnnnnnnnnnnnnnnnnnnnnnnnnnnnnnnnnnnnnnnnnnnnnnnnnnnnnnnnnnnnnnnnnnnnnnnnnnnnnnnnnnnnnnnnnnnnnnnnnnnnnnnnnnnnnnnnnnnnnnnnnnnnnnnnnnnnnnnnnnnnnnnnnnnnc

SEQ ID NO: 7279 - DNA, 487 bp, Homo sapiens
  misc_feature (1)..(487): n=a,t,g or c
gcaaattcatcaaaaccatcaaattgccaaaacaaagaatcagctagcaaacagtcttaggaatcgtgcagggggagaaatccttgagccagggctgccatataacctgacaggaacatgctactgaagtttattttaccattgactgctgccctcaatctagaacgctacacaagaaatatttgttttactcagcaggtgtgccttaacctccctattcagaaagctccacatcaataaacatgacactctgaagtgaaagtagccacgagaattgtgctacttatactggttcataatctggaggcaaggttcgacctgcagccgccccgtcagcctgtgctaggcatgggtgtcttcacaggaggcaaatccagagcctggctgtggggaaagtgaccactctgccctgaccccgatcagttaaggagctgtgcaataaccttcctagtacctgagtgagtgtgtaacttattggggttggcga

SEQ ID NO: 7280 - DNA, 499 bp, Homo sapiens
  misc_feature (1)..(499): n=a,t,g or c
gaattagagcgctcatttttgtcagaaccatcatctccaggaagaaccaagactactaaaggattcaaacttgggaagcacaagcatgagacctttataacgtcaaggaaactacagtcgtcgggaaggaacaagaggctccagttggagtgctcagaatactcctcgaggaaattacaatgaaagtcgtggaggccagagcaattttaacagaggccctcttccaccattacgaccccttagttctacaggttaccgcccaagtcctcgggccgtgcttctagaggtcgtgggggacttggaccttcctgggctagtgcaaatagcggcagtggaggctcaagaggaaagtttgttagtggaggcagtggtagaggtcgtcatgtacgctcctttacacgataaaaatcctttcgggaacatcttaactgtatatgaacatttcacgaggacaataaaaatgagacattgaaggnccaatttagacttagcagtttaa

SEQ ID NO: 7281 - DNA, 452 bp, Homo sapiens
  misc_feature (1)..(452): n=a,t,g or c
aaaaatgatgattttgcaagacctagattttggcttggtttcttgcctccttttttggcagccttcatcttctcatctcccaaaccccctgagcccgtagttcttcatagtggacaaagaacttgtggtcttttaaaactgggactgatacttttttgagagagtatcgtgtcgaaagtgtgatgttctaccactttaccaataactaattttaaatacacattgtcctctcgatttttggaccaaacagacgctcacagtggacggcttatcaacgggttgcattggggaagaagcctctccctctctgtcagcaccagctggtaaaggtgactgtacagatgtgcattttccttttggtataaatggtccacagcactaactggtaaggcttattgtacagtatattgtcagtattcttctggttcagcataccttatagttcatatata

SEQ ID NO: 7282 - DNA, 1614 bp, Homo sapiens
  misc_feature (1)..(1614): n=a,t,g or c
gaattcgggatcagggcaagcattgtggagcggttccttatgccaggctgccatgtgagatgatccaagaccaaaacaaggccctagactgcagtaaaacccagaactcaagtagggcagaaggtggaaggctcatatggatagaaggcccaaagtataagacagatggtttgagacttgagacccgaggactaagatggaaagcccatgttccaagatagatagaagcctcaggcctgaaaccaacaaaagcctcaagagccaagaaaacagagggtggcctgaattggaccgaaggcctgagttggatggaagtctcaaggcttgagttagaagtcttaagacctgggacaggacacatggaaggcctaagaactgagacttgtgacacaaggccaacgacctaagattagcccagggttgtagctggaagacctacaacccaaggatggaaggcccctgtcacaaagcctacctagatggatagaggacccaagcgaaaaaggtatctcaagactaacggccggaatctggaggcccatgacccagaacccaggaaggatagaagcttgaagacctggggaaatcccaagatgagaaccctaaaccctacctcttttctattgtttacacttcttactcttagatatttccagttctcctgtttatctttaagcctgattcttttgagatgtactttttgatgttgccggttacctttagattgacagtattatgcctgggccagtcttgagccagctttaaatcacagcttttacctatttgttaggctatagtgttttgtaaacttctgtttctattcacatcttctccacttgagagagacaccaaaatccagtcagtatctaatctggcttttgttaacttccctcaggagcagacattcatataggtgatactgtatttcagtcctttcttttgaccccagaagccctagactgagaagataaaatggtcaggttgttggggaaaaaaaagtgccaggctctctagagaaaaatgtgaagagatgctccaggccaatgagaagaattagacaagaaatacacagatgtgccagacttctgagaagcacctgccagcaacagcttccttctttgagcttaggtgagcaggattctggggtttgggatttctagtgatggttatggaaagggtgactgtgcctgggacaaagcgaggtcccaaggggacagcctgaactccctgctcatagtagtggccaaataatttggtggactgtgccaacgctactcctgggtttaatacccatctctaggcttaaagatgagagaacctgggactgttgagcatgtttaatactttccttgatttttttcttcctgtttatctgggaagttgatttaaatgactgataatgtgtatgaaagcactgtaaaacataagagaaaaaccaattagtgtattggcaatcatgcagttaacatttgaaagtgcagtgtaaatttgaagcattatgtaaatcaggggtccacagtttttctgtaaggggtcaaatcataaatactttagactctgggccatatggtttctgttacatatttgttaggctatagtgtcttgcccgaattc

SEQ ID NO: 7283 - DNA, 1445 bp, Homo sapiens
  misc_feature (1)..(1445): n=a,t,g or c
ctgccccacacacactaacccaaccatcttggggtggactccctgccagcccaactgttgtattttcagttcttccagtgtgaatcagttaatattctcgggaacgagggagaggttgatcctatgaggaaatcaaccacagtgaaaaggcttgggccgcttttgttttcgcctccttttgttgaacaaatttgatttccggagtcagtcattttactgtcaagacatttcttcggcattctgcaacagtttccaacatggctagatccatcagaaactgaagccgtggagaacgctctcggggcctttgccacttcttggagtagaagccgacagagagctgtttggaaacttctccttcacacaccagttgaagactaggctttggaggttttcaaagcagacggtgcttggatgggcagggagaagtaacattctgcaaatcgccgtcagaggtcctgaggacacagacctacctggcttgcattccccttgctgaatggcgtgtgctgcagctgcccactgagggctcttttccctgggattctggacttcagagtaggacagcaggctgggaagatgctgagttccatcaagtgcgtgttggtgggcgactctgctgtggggaaaacctctctgttggtgcgcttcacctccgagaccttcccggaggcctacaagcccacagtgtacgagaacacaggggtggacgtcttcatggatggcatccagatcagcctgggcctctgggacacagccggcaatgacgccttcagaagcatccggcccctgtcctaccagcaggcagacgtggtgctgatgtgctactctgtggccaaccataactcattcctgaacttgaagaacaagtggattggtgaaattaggagcaacttgccctgtacccctgtgctggtggtggccacccagactgaccagcgggagatggggccccacagggcctcctgcgtcaatgccatggaagggaagaaactggcccaggatgtcagagccaagggctacctggagtgctcagcccttagcaatcggggagtacagcaggtgtttgagtgcgccgtccgaactgccgtcaaccaggccaggagacgaaacagaaggaggctcttctccatcaatgagtgcaagatcttctaaaccccaagagacttcacacaacacttatgtatgcaccccaaagactaatggggagagggagggccgggaagccaggaaagcttggtgttttctctgggtacaccccaagcagcgtctccgttttggatacagttattgatgaggcttggccactggatgttttcactaactacactctacaagtgaactccttgcccaggccagttagaaaatcccttggggaactgtgatgaatattccatctttgattaaaaaagtgaaatagtctccataaaaaaaaaaaaaaaaaa

SEQ ID NO: 7284 - DNA, 549 bp, Homo sapiens
  misc_feature (1)..(549): n=a,t,g or c
aaaataaaaataaagcggactttatttagaagataaaggtggtggttatcggttttggttaatcgagttgggctcaagtgttttacaggtcttaaatgccatcacagactggcatgccaaggnatttctgaatgccaattacagattgaagttgtttcaaaaaccaagatgctatcaaaagctgatgagtttggatttttcttaaagttggactaacacacttcttaaatatttgtaagagtaaatagattgcttggttctgaaagttaaaacactacactgagcaattccccttctccacaagtccctaaggcaatattacagttgcctctgacagcaagtccaacatttcaacaaagggggggtgaggagaactgggaaaaatgaaaagcaaaattaataaatgtaattgatacaggcagctgccacttgtgaanaccaaagcctagtccgatgcccattatcttcacatttgcactggacatcttcccaagcagacggtaactacattcttgaaggaatgtgccaagactagggtggggaaaggcc

SEQ ID NO: 7285 - DNA, 466 bp, Homo sapiens
  misc_feature (1)..(466): n=a,t,g or c
tttttttttagggaagaaacaatcttatttattaatggcctgcatatttagaaagggtttaaaaacacatacatttcctgggacacaaacttacttaccaaatgtatgtccttacaaaataacttcacagatcaatagtcttgaacttacacaaagacatatatatgacatacattaggttaatatacatttcaaatgtttttgcagcaactttctaccagaaagtacactaatgtgagaatgtatgttctctttaaccccttaaaaatagtaataaaaaattacaaaataatgtaaatgtaaaattaaggcttgagactacatattcnagtattaataaagtcaaacaaacaatagttataaaacttggtgctgctgaatattttatatatatatatttatntatatatatatatatatacgcncacacacacacacgggataagtccttngagatttgaaatgc

SEQ ID NO: 7286 - DNA, 572 bp, Homo sapiens
  misc_feature (1)..(572): n=a,t,g or c
ttttttttgaaggaagaggaaacacatttaatactggtactgttttcaataacaaattaaaccagtgattctgaatccttcctgcacattcaaattacctggagaactttaaaaaaaatactgatgaccaggtcttgtctcaaattacatgaaaatgggaatcaagattcaggcatggatatttttaaaaactctccaaatgattctaaaatgcagtcagggttgagagcaactgattgaaacctacatatttcttactgttccttgactgagaagaatgtcctataaatatagaaatagaactttttcctttacaggttgggcatacaagggtatctccagttagcagtaacttatggaggggtaagtcaagttattaatttatacttcatttccattaaaatatctacttatacctctcttcattcccgtaattctgtactctcaaactccaagaccaagaagagtcgaactacacttttataataaatttgttacactgaaaatncttattcattcatgcatgtaagtatttactgaatggcctactatggtgcaggccnggtgttaag

SEQ ID NO: 7287 - DNA, 376 bp, Homo sapiens; identical to SEQ ID NO: 4009
  misc_feature (1)..(376): n=a,t,g or c

SEQ ID NO: 7288 - DNA, 545 bp, Homo sapiens; identical to SEQ ID NO: 5435
  misc_feature (1)..(545): n=a,t,g or c

SEQ ID NO: 7289 - DNA, 830 bp, Homo sapiens
  misc_feature (1)..(830): n=a,t,g or c
ttttttttaaatgcaagtaaaaaaaagtttaatcacacagcactttatacagatatcgtaagcagtaggcattcacatctccacatgtacaatgcactgggaagcacagccccaccagtcactccgggtgtttctcaaacaagataccgactcggttccaaatgccacggtgtgtggtccggctccatcctcccgcagctctgctggctgggcggtcacagcacagcacaggtgtggagcccacttaaggctgacaagacgcatcatgctttggctttttttttgtctttttttctaataagagttaatatctttgcttttgagttttttttccaaccttaaatattacatacatacaccaaaaattacatagctgcaatgtgctcaacagcatcctctcggcctggagcttcacattatcaaaagcttagaaaacttgtaaacctctgggcctgtctctgggcactaggagagcccccgccggccgtccccttcggattgagcctgcagtttgtaagcgaagggctgacagtaggccttctagtccaagagagggctggctcgcttggagttcagtgagctgcacgccgtcccagtgtgaccatgtgatgggggaggggcccagcacttggccctggccttgtgcagctgctcttggcccccagcagccttccgacagaagagcaaggcacctatagctgttgcttccctgcagctccnggtcctcaaatccatgtgcagtgtgaaggccacaactctcctggggtcancggaaaccagctggtnccaacnctctagagggcaattcaaaggcntaggntaaaagggtc

SEQ ID NO: 7290 - DNA, 263 bp, Homo sapiens; identical to SEQ ID NO: 4677
  misc_feature (1)..(263): n=a,t,g or c

SEQ ID NO: 7291 - DNA, 388 bp, Homo sapiens
  misc_feature (1)..(388): n=a,t,g or c
aatttcctgcaataagtagtcatttaattaaagaacaaaattaacaggaatcaaaatgttgcagctgtattttttgttagacattatataaaaaaggaaaagtataatacagtaaatcatcttgtataacatgaacttaaagagttttcaaattaattatgatcaggataaaaatgtcttttgaacataatactgaatgacactgtcacatgtccctcatgtcagaggcctgggagtggtgagcctgcacatgcacgttgcccgtcctccattacactgcagaactgtaaaacaaggttgaaaggcaaacaacagttttcttctgatagagttatgttgggtcttaactgaccccaacagttcacactcctcagacaccaaagaagga

SEQ ID NO: 7292 - DNA, 454 bp, Homo sapiens
  misc_feature (1)..(454): n=a,t,g or c
tcaagttttcataaaaatccataattattgaaacccaagttacagagaaagttcgtaacttttttattgaattattgactctgccgcgtgtcggttcgtcggctttcaactccagtctgtcaatgcccctgtgtaggtggggtccccaggtctgggcttctgaggtcccggtagaaggagggcaggtggtgagggctggcggggggcagcaggggacggaggcgggagggagaaagagaacgtgtgtagaagggtagggaggaggtgggaaggactggagagtgagcaggtggcggccaggccccttcccctgcccggccgcccaggggtccctgccccccgccccggcctcatatcatcttcatgttgaacttgcggggcgcgtcggcggactgatgcctgcgtccgactttcggggcacatactcgatctcgatgttgtgctttgtgttgcc

SEQ ID NO: 7293 - DNA, 217 bp, Homo sapiens
  misc_feature (1)..(217): n=a,t,g or c
tcaaaataacataaatcttttattgaaagtcactttactaatgttacaatgggagtaacatagaaaaccatggtatcttattagcttccgaagtgaatactaataaaactgtgccagaaatttgaaccttaagttacagtgacctttaaaaacatcaagattttgtttacctacaatgtaagaacaattttataacttgaacagccataaaacaaat

SEQ ID NO: 7294 - DNA, 228 bp, Homo sapiens
  misc_feature (1)..(228): n=a,t,g or c
ggaatggtagatgctcatttatgtaaaatcataataaatgttacacaaactgttagaataaaaaaataccttttttggggtggaggaggtccccagcctgctgctgggtagtgagagggggttagcaccattagggcgcagggggcgggactccgcancagcccgtggtgggcactgaggtctgtcggtcggtctgtgcatcctggcacagtcagcggcgggcaaccc

SEQ ID NO: 7295 - DNA, 326 bp, Homo sapiens; identical to SEQ ID NO: 6633
  misc_feature (1)..(326): n=a,t,g or c

SEQ ID NO: 7296 - DNA, 257 bp, Homo sapiens
  misc_feature (1)..(257): n=a,t,g or c
attttctgaattatttattaacatttctcagatgttctaaagccctcccttgcctcctctctgccaaaccagggccctctgtcctacttcaaaagcccaagagctcacttaataaagcaagccccagtccccacctgggaagggcctggtcacatgggagggcaggtgagggtccctgagggacagcttgttgccctcactgttcctgagatgccccagcccaagaacgaaacaaaacttctcatcatttctcctca

SEQ ID NO: 7297 - DNA, 326 bp, Homo sapiens
  misc_feature (1)..(326): n=a,t,g or c
ttttttttttttttttgtgtaatggttttattgccctttaccaaggggagaaaaatacacattacagaaatagcagcaactttaattacaagcaaaggttgattttattcccacacccccaatgacttgttttggtttcagcaaataatttattaataaatgcatctagtaaacctcaaatagttatactgaatatttaaattcattggctaaaattatggcttaaacagttgatatgtgaaccaaacaccacaataaaaatgggtttttaaaaattaaggtatataacaaataaattaccaaattttctgtaaacctgccaaact

SEQ ID NO: 7298 - DNA, 292 bp, Homo sapiens; identical to SEQ ID NO: 6635
  misc_feature (1)..(292): n=a,t,g or c

SEQ ID NO: 7299 - DNA, 368 bp, Homo sapiens
  misc_feature (1)..(368): n=a,t,g or c
gtgtgtaaagggtttttattggagagcctgtgcggctgaagtgccaccaaggatttggaaggtcactttcagcagccgccatttctgccaggaccagtggcaagcacctggcagatggagcccgggtgtttctgcgtaaggcagaggaatccagcttttccatgagattcagctgcagttgtcgaaaaccctgtgtgagccagcagttccagttcaaaggttgagggggcgaacagctgcgaggtggccaggctcccgtgagtcaccactcaggcctgagtacaccgtggagaggagagataaagcagccacggctgttcttgttgccagtcccacccctctggcaaacagatgggggaaaacagaga

SEQ ID NO: 7300 - DNA, 403 bp, Homo sapiens
  misc_feature (1)..(403): n=a,t,g or c
cttctaatttccatcatgcagccatttgcttccatccttctaagaattattaatgttctgtatatatacacccattgcaggcttgtattccacaataacaaagtcatgtatagagaatgtgaaatgatacttgaaaaccaagatatataaaatattgaagtcatttatgccttttgatgactgggttaaatatgcaaagcagctaaaggaatatctacaccacccacccccgtttttaactcacacaaagcatatgtagacagaaaaactgaacatactttaagagcacacgcttttttttcggctaagaatcacactatcatcgtagctttgcaactgatgtctgtggtaacatactggttataaaagacatgaaactcacaaaaggaaattagaacttagc

SEQ ID NO: 7301 - DNA, 488 bp, Homo sapiens
  misc_feature (1)..(488): n=a,t,g or c
ttttttttttaaaaaagggtcctatgtggaaatgagtgggacaatgataaaaataaacaaataattaaaattccaaatcaaaacataactcctggccctgagatccccagttaatcctctaagaccacaatctccacattgtgaacttgatgctggtgttcttccatctcagccacaactttctcctcagtcctcagctctgtctccaagatgactgctttgccctcagtatcttcagcttctgggtccggggctggatcaatctcaatgatggtctgcccatcctctgaggtgctttcaacagcctgaattgccgaggttaggccggactccatggccaccaattccacagggctaaccatggtggtcatgttgcccagtgtactcccatcctgcatggcagtagagctcagcagcgccaagctagatgaagggtggatggtcactgtgtctggtgagctgctcttggcagaggagaccactgtggc

SEQ ID NO: 7302 - DNA, 406 bp, Homo sapiens
  misc_feature (1)..(406): n=a,t,g or c
gctttctttctggtttaattccattcaacgcccccctcccccatagcacctggggggccgcagaacacccgcccgagtctgtaaaaagtcacagtttgaagagaatgagaggggcagtgtgggcctgcgtgggacgcctacgcagcggactgctcctcaggctcggcgttctcggccaggtgcagcttctggatagaattactgaggtcttccagattgctaagcagctggtccaggttacggtcagccattgtcttcttctgctcctctggcagcccctcagtgaccccatcctcttcctcttcatcgtcctcctcctccccacacacatccaggctgaagtgcagccgggctagcttctcctgcatctcccgaacgtgctccagctgctcaaaggagcattcct

SEQ ID NO: 7303 - DNA, 308 bp, Homo sapiens
  misc_feature (1)..(308): n=a,t,g or c
aatgacttttggtttttgtctttgtttttaatcatggtcccaaaggcagaaggcagtattttatctactaagtcacacagcttgtgagaggaaaggatgtctgtgtcaggcatgttaacttcaaacaaaatctgagatcggctttttccattgacattcttagcacagcacccaaagaagtataatctagccacagtgtcgtataatgaggcacggcttattgcagctggaaatcaattatcctcacgctgaggtggggattctagtgttcctttgactctgtggatactccccaaatggtgtctgtc

SEQ ID NO: 7304 - DNA, 444 bp, Homo sapiens
  misc_feature (1)..(444): n=a,t,g or c
ttttttttttttttttccttcaactttttttattatggaaaatttcaaacaaacacagtagagaaaatagtatcatgcaccccatgtacccttttcagtcagcttcaataattatcattgtatggataatcttttcatctctatacccatctagccccctatttctcaaattcttttgaagtacatctcaaaccttatattatttcgtatgatcatctctcacagttctgtgcagaatatattgttgggggatgggaatggaagcagagacggggggaagagaccattgcaacagtccaggaaggggaagatgacctgaaatatatggtggtaggagtgggaatgatgaggagtggtcaaattcaggtacacagtattttagatgtaaaactgacaggaactgctgatggattagatgtgggaggtgagggaaagtgagacata

SEQ ID NO: 7305 - DNA, 241 bp, Homo sapiens
  misc_feature (1)..(241): n=a,t,g or c
gaagatggctgacctcaaatcttatatcctaaatattaacgatatcccccaagttaatatacagaaaaacatgattctaaaataaatacacaggctttttaaaaaaaacttaattagggcctgtctagtgatgccctgggccggtgctgcactgctttagggaagcccctggctggtatctatgtttcctatagcacctctaggcactgggaaggagcctggaggagagctctggcttcta

SEQ ID NO: 7306 - DNA, 318 bp, Homo sapiens
  misc_feature (1)..(318): n=a,t,g or c
tttgtgtatcaacctctctttttattaagattttgaaatatgttggtatcacagatataaaacattctcatgttctttaaagagaattcacttttatgctagaaatgatggaaagggcttggtccatgacactttgctgagttattttgcttcatctgcatattactttgggaagaagatacaacatggtaaaataacagttttgaagaagaaaaaaataataatgactgttctaataacaagtcaagtttttcttttgtttggttggtttcagtcttttcatgggtttaaaaatataatgcagacttaatgtctttt

SEQ ID NO: 7307 - DNA, 261 bp, Homo sapiens
  misc_feature (1)..(261): n=a,t,g or c
ttttttttaatgggtcttgtgtgttttttattattcaggtttttaatcacagttctgttccaaggttatcttactataataagcagttatcttttgatcacccaattcctgaattcagtaagcaagttacaattcaaaaaggaagaagagtaaaaaccttttattgacagtgactttgccactgaattcaagggaatggaactagctgggaacccagttaaaaagaaaatatttgctcctggactacttttactgagatac

SEQ ID NO: 7308 - DNA, 483 bp, Homo sapiens
  misc_feature (1)..(483): n=a,t,g or c
cacaatatattgcaaaattttaataccatgtggttaaacacaatattcaaatattaaacttttcaagcacatgaaagtcaccttctgaaagacaaactgggctttttttataactacctttgtgtaactttataaaattacttccctcaacaatatctgacactgatcttgatactagttagaaagtctgatgtaagatgatgacatctcaacgtcagtgatttaggagattatcttcagaattcatcagaggaccaatcgtcatcttcatcccttacttctcggtatctccctgaagactccccttctggattataactccgcattttaatattcagtctttcagctaatttttgcgctgcgagctttgcttgcatctcctcataattctgtttctgctgtttctgaagtgccaaggattcttctatggagagcagctgcgtgggcatatggtgaagtggtagaagccgagctgctgtgatg

SEQ ID NO: 7309 - DNA, 341 bp, Homo sapiens
  misc_feature (1)..(341): n=a,t,g or c
ttttttttttttccagcataaacctatctgtgtttaataaaagaagggaagagaaaggccacacatacgctttcataagcacagaaaacttctggaaggctttgcgaaaaagagccgactggcagcttgcgcgaggcctttacccttcaacggactccagactcctgtactcttttttaaccataagcatgggttgcttttatgtattttttaaaattaatgttgttttaaacaactttgatttaaagatggtggggaaaagacctttggtcgttgtccctcaaacactcacaaaactataaggcgaaaaacaggaactcaaaccttggatactatgaggg

SEQ ID NO: 7310 - DNA, 491 bp, Homo sapiens; identical to SEQ ID NO: 4682
  misc_feature (1)..(491): n=a,t,g or c

SEQ ID NO: 7311 - DNA, 434 bp, Homo sapiens; identical to SEQ ID NO: 928
  misc_feature (1)..(434): n=a,t,g or c

SEQ ID NO: 7312 - DNA, 130 bp, Homo sapiens
  misc_feature (1)..(130): n=a,t,g or c
ttatttattgcttgtaaaatagtcttcccttttattttaaatcaacccttttccaagttagtgccacgagttgagatcagggggtcagagcccactgggatgtggcaggggcagcagggggactcatgtc

SEQ ID NO: 7313 - DNA, 261 bp, Homo sapiens
  misc_feature (1)..(261): n=a,t,g or c
tttttcagaaaaatgtgttacttttaattttcaattatgtgagcatgcaacattgctaaatacaaaagtcatacaagctcacaaatgacttcagagactgccactcttgtaattaaagaacaatttagggtctattaagacatcataaatcatagatcctttcctattttcacttgatgactacacattttctccctactactactgctactacaggtttcacttagaagctttgctgcccggcagttacatttctttatc

SEQ ID NO: 7314 - DNA, 284 bp, Homo sapiens; identical to SEQ ID NO: 3605
  misc_feature (1)..(284): n=a,t,g or c

SEQ ID NO: 7315 - DNA, 442 bp, Homo sapiens
  misc_feature (1)..(442): n=a,t,g or c
tttgtaacttaaaatacaaaagtcatttagtatacattattactccccattgtaattccagatttggtacagtatctttttcatttcctgacataaaccattaagacagcacaggctgtagtacttcattgtgaggtggctacaactctataatatgcacagtgattttaaaataggctttttgcatgccttgcatgaaaggtgctacatacaaacctgttttgtgaactctttggtaaccaccaatttaaaaatttggatgaaagcatttccacatggacagatctgaagcacattattggagctctgagccaaagctattaccctgtatattgattcttcagtttccttgaggggttaggtgttgatttagaatacagccagataatttaaagcatgtcaggccccggttaggaaaatgaaaatggctccgattcgtttc

SEQ ID NO: 7316 - DNA, 364 bp, Homo sapiens
  misc_feature (1)..(364): n=a,t,g or c
ttttttcaagagaatggattgtctaatttttaggagccaacaaatgctcattaatcaatgccccacggaagaacatgagaagacagtgttggcatttaaaacaataactgtggccattaccaggccccaggatggacagatagggacaaggacagggatacccagcatttctctgagagctggtgcaagaggattaatcctgaagggctcatttctgattctcctctgctggacaaagaatgactgagttggaacctcagagggtgcaagtcaaggtgccaagagtaagatgccagtttcggtctgtaagcaagtgtttctgggggtgagggaaggtcaggggaaacctgaccactggacagga

SEQ ID NO: 7317 - DNA, 505 bp, Homo sapiens
  misc_feature (1)..(505): n=a,t,g or c
ttttttttttttcatttggctttttgatgctgtgacttttattctaatacacacattgatttgattaaaccaagttcagggataaggcaaatatacattcttgttcccgaaaacatcccaggcagtttcagcgtctttcagcacagatgaggtagggttggggctgcaatgtcatgcctaacctgggcttcagatctggaactagttcatgtggaaaatgcaaatgaaacctctgaagcaatgctgtaaaaaacaagaacatttccatccgagccaagtgttctccaagacaatgtcttcttcctagggaaaaaggaaccaaagcttccttcttggcaaaatatccactgctgtccagaaatcgctcaggatggaacacttctgggtctctccagtacttttcatcaaagtgtacagaataaagatttgtaattactgttgtgcctttaggaatgggataaccacgtacaactgcatcttcagaggttgcatggaaaatccctaa

SEQ ID NO: 7318 - DNA, 391 bp, Homo sapiens
  misc_feature (1)..(391): n=a,t,g or c
caaatgacatagtgagagttatgatcggttacttgggttgtaaggattgaaaacatacctagatcatataaatttgtgaaggttttgccatcacaagcattatagggaataatgaacatcaactatcctacagctaaacctaatgaagaccaaattgcctccaaggtcaaaacaatatttctttgtgctcaaaagtggttcacataattgatgctgcattgatgctgtctatagagattctagttttctccacattttctctatttttcaatttcctttcttttcactggggtctattgttctttaacagaagtaatggccttttgtaaatatataattttcacgttgtaagcattctttccaagctagctgcccatcatcacgttttggc

SEQ ID NO: 7319 - DNA, 389 bp, Homo sapiens
  misc_feature (1)..(389): n=a,t,g or c
attttttgacaagtttattgaacagtattcaagacttcatctttataaacaaaaacctctgctgagtgatgccaaggcagtatttgctggcaatgttgtggccatattggcaacaagccattttgttgtgtttggtttctaaagtctggactactatagaactgccagtaaaacaatttaaatgtggcaattttgcaagggtggaaaataatttttaaagtgaccacttccagaaattctttccaaaagatttgactagcagcaattttacattttctttactcatttcccgagtgttcttaaaattgatgagattttacacttggcccatacctgtacacaaccacagactccagtaaaagggagctggaatttaaggctttcacgca

SEQ ID NO: 7320 - DNA, 389 bp, Homo sapiens
  misc_feature (1)..(389): n=a,t,g or c
tttaataatacactgattatatccactgggtttttttttttttaacagtatgaatttcctcttatagcaataatggatgagatttaaatgacagctttctcacattcattatggcatacagtgccccccaaccaagtcatcttggatgtgttgataaaagatttctcaatattcattatactcataagtactctcctctcatgcaaattctctaaaataacactagtgaaaatggtagctaatatttgtggtatgctacgttcaaggcaccaatctaagagcttttacatgtaataacttacataatacttccaagaatcttacaataaaggtaatatacttaggtctatcttaaaatgattaaaccaaggtagaggttaagtatcatg

SEQ ID NO: 7321 - DNA, 266 bp, Homo sapiens
  misc_feature (1)..(266): n=a,t,g or c
ttttaaatgccaacgttatatgttttatttttaatcaagtaatttttttaaacctcaacatatccataattgacagaataagacattaggcatgaaatgagaatataaaacccagagtgtacagaaaggcaaacagtgcttcagtccctccagatgactgcatgcgagtgaaacgcattccaaacatctaccccttttttgtcttttaaaaacatacagttcaagtgtttttattttcacttgtaaacaacatgagtcaaaatgga

SEQ ID NO: 7322 - DNA, 403 bp, Homo sapiens
  misc_feature (1)..(403): n=a,t,g or c
tatgtggacttcttttaaacatttattaaaaaagcaaaatgtatgttcatctcaaatctaacagttaaaaatggtaaagcaatacaaacaatgtgttactagcagcatccagtcgttagaatctctcaccctgcttctcggtctgatctgtgcaagctcagtctcttctgaccctgcagctacctccatccctcatcgtagtgcaggccaaaccaaattttataaaattaacaatttaaggttaaataagcttaaataagggtgttaaatacaagacacttcatcaaagcttctgtacaaagataaacaaatctggcattgtacaagtggttccgctggctcacagcacacagggaagttctagtgagtaagcagattcactctcatttctttccagcagagc

SEQ ID NO: 7323 - DNA, 394 bp, Homo sapiens
  misc_feature (1)..(394): n=a,t,g or c
tttttttttttttttttttttgccaaacatgacaaatttatttgaaagtgggcattgcaatgtagaatatggtgtcatagtaaactataggtgtattcagggaggtaaaggaagataaggggtttaaaaggaaaaacgaggaggattacgtaagttgttttgaaacaattatccttggctacaaagatcagtaacaaaggggatggccagtccaaggttggacaggcagttgctgcgcagggggcgtgggggcatttttttgtgtagttttgtggcctttgtgcaaggttgtggttttggcagtcttttgtgctaattctttatatcaggcaattattagtgagaactttcccatcacggctttccctgactccattctctgacagctttcaca

SEQ ID NO: 7324 - DNA, 391 bp, Homo sapiens
  misc_feature (1)..(391): n=a,t,g or c
acttttcaattttattgtataacttttcattaaagtgagaaagccattatattcataagacaaacacagtatcaaagaagttaaagtcattaggtaatgaaataacaatcatctcaaatttggatgcacatgctcaataactttttctctcagcctaaatgccttattgacagggaaaagttatatgagaggaaaacaaagtggcaagaaaactgcactggcccctcaggacaaaaactcatcagggaaagattcaaatgttttaaagttctgcaaaagcaatatgaaaaaccaaagtccagcattgggggcgggtaaaggtgggtttgtgaataggaagaaaggctggaagtttcagctcccttacagagtacctggaaaaaagacactg

SEQ ID NO: 7325 - DNA, 372 bp, Homo sapiens
  misc_feature (1)..(372): n=a,t,g or c
tttttttttttacctttttaaagtaacatttaaaattacttcctttaatataaaagaaacacacaagacacaaagaaagcccaataaagctgtgagtcccagtttggtagctgaggaggagtctaagaaaacaagccattcctcagtatccctgggaaagaaggggtgagaggacacagatatcaccaggccctgggtgactgcattgctggggccatgcagggcatagctctccaccaagggaaagtgctgattttccttgtcatggtcctggccttgctcccatgctcgtcctccagttttcagaagtcgtccagttccaagaatggctccttcctttagttcactaacattttcacttaggggtgaagg

SEQ ID NO: 7326 - DNA, 510 bp, Homo sapiens
  misc_feature (1)..(510): n=a,t,g or c
tttttactttaaatatatcttttaatgacttagtacactgttaggcttgtaagacagccttaaaaaatcataaaggggaacatgatcacatggcatgaaatgaacatttacatgctgttaaataacattttaaaatgtatgtatctatagccaataccatagaataccatatccaatatgaatagaaacagcacaattacttcaaaaaggaaatctgcatcaggctttagtgtgttgtcaaagtactttcggatattacctcatttgagagtaagaaaactgaggctcagaaaacaagtgacttgctaatgctgagggtcaaggtctttggaattcaaataccatgtgctttgcccattcctttttccttccattaaaccaatatcctcaaaatgccagttaaaaaaaaaaaatgtgtgtatatgaaacaaaatgaatgtaataaacaacattgaacaaagaaaaaactcaagcaatacgattaacataatcagtgctgaaaatgaatgg

SEQ ID NO: 7327 - DNA, 430 bp, Homo sapiens
  misc_feature (1)..(430): n=a,t,g or c
tttttgctcaccagcttgggctttactttagttcagtactgtttttatcagacccgtaactgctggctctacttagagtgacagttttgctgaagattcttacccccacctctcctgacatcctctaagctcttgcctggagccaagaggcctggtggtgaagtaaggatagggtgtggatcaggagattctcaactccttggcttctaggcactgtccagctgggaggcagaggggaacttgtactctgaagcctgtgactcctcttaagcctcacatctcttcaccactactctggtgccctggttatctgtcccacagcgagaggtattttatgtccataaagtgcccgtggtaagtgctcagaattcatctcttggctgtggcgggtgctgtcatttctcattccattgaggggaagaaactgagg

SEQ ID NO: 7328 - DNA, 387 bp, Homo sapiens
  misc_feature (1)..(387): n=a,t,g or c
ttttctctcacagcactccccacatttattatactacagatgcttttcagcttataatggggctacatcccaataaacccaacaaaagttgaaaataccgttaagtgaaaaatgcatttaatacacctaggctaccttaaacctactcagatcacttacattagcttacagttgggcaaactcatctaacacaaagcctattttataataaagtgttgaatgtctcatgtaatttattgaatactgtactgattgtatggatacttgaagtactgtttctaccgaatgtgtatagcttttgcacaatcctaaagttgaaaaactggaagtcaaaccatcattatgttcaggcccatctgtatttctgaccccctactagactagctc

SEQ ID NO: 7329 - DNA, 377 bp, Homo sapiens
  misc_feature (1)..(377): n=a,t,g or c
ttttttttttttttttttttttttttttttttgaggtgccagagtttggtttattggctcatccagtgccaaaggtccaatgggcaccctcttcccaaggaaccgggagccccgcggctcctgcatttctctttctccttcacgtgttcctcctggccctgactgaagccgtggcagaagctggggcgggtgtgagcagaggctgggttctgccaggggtcttagggcccagtctgcttggtacaggatggggaccctgggcaagaggggatggaccccaggggcagaggagaggggcccactcagcaggggcctgtaccagacagagcaggggtgggcctgaggagcacgggagtccagcccaggggcacggtggc

SEQ ID NO: 7330 - DNA, 284 bp, Homo sapiens
  misc_feature (1)..(284): n=a,t,g or c
accataatttctatgttttattttgactatctttaatgccaatccttcacaaatttgttacatacttctccgtagctcaagcagagattaacattttaaagtcatttaaagaataatcagcattataaataagtaatagaatgatattttacatttgtatagaaccttgaagtgtaaaatattccttttttttttttgagacagagtctcactctgtttcccaggctggagtgcagtagtgtgatcatggctcactgtagcctcgacctcccaggctcaggtga

SEQ ID NO: 7331 - DNA, 327 bp, Homo sapiens
  misc_feature (1)..(327): n=a,t,g or c
ggtggcgagaaaatagtactgttaaggcaaatcttaccccgtagcagttaccagcaggacaggcaattttcagtgggcttttcagaagctggttgccatgacaaagagcacaatttattcctcagtcccttatcacagctacgntcacagaccataaaanttaacaccgctcttttccatctgatttcagagttcctcatccttacctgaggccttttgttcccccaattaaatggaatgaatgtcagtcatttagcaattcaattaatgctgattcaaaattccggccaaaaccagaatctataatcacancttcctaatcacagt

SEQ ID NO: 7332 - DNA, 326 bp, Homo sapiens
  misc_feature (1)..(326): n=a,t,g or c
ggagagacagggtttccatatgtngcccaggctggtcttaaactcctaggctcaaacaaccctcccacctcagcctcccaaagtnctgggattccaggcatgagccaccaagtactagttgtctaccctagtgattgcncggcttactgggaactgcaactcactgttgctgcccagcttcgtgacagatactgtactgcatatcgccagcctgggaaaagatcaaaacccaatattcaaagtatagttttgactgaatgtgtgtccctttcataccatcgtaaagtgcataaattgtaagttgaagaccatctatatattattgt

SEQ ID NO: 7333 - DNA, 152 bp, Homo sapiens
  misc_feature (1)..(152): n=a,t,g or c
ttttttttttagggaggtccaaggttttttattcacttgttcatacaatcacattagaataaatgcatcatataaaagttcatgctgtcagtgctgtaaccattaagtaataatgtttcccactttttctgaatggcccaccagtataaata

SEQ ID NO: 7334 - DNA, 450 bp, Homo sapiens; identical to SEQ ID NO: 7051
  misc_feature (1)..(450): n=a,t,g or c

SEQ ID NO: 7335 - DNA, 432 bp, Homo sapiens
  misc_feature (1)..(432): n=a,t,g or c
tttttttttttatcaattcaaattatatattttcatcttgtccctccaaaagaaaaaagaacaacgcatttttatcaagcaaaagataagtggcaataatacaaggaataacgaacatataatattttttcattaacaatccaaacactacaaaacatagaatatgcaatttaaaaatggaaatacaaattaatgaaaagttgggtacatgtcacattaggcaatgcaaaagaccagcttaagcatagtttctctaaattgacaattaataaaaggaaagttccctttctcaaatatggcacaaaaatatttcagtcacttctaggggaaaggttaattcaaaatgttccacttaattctnattattacagcctgtattactaatgggtttacggaacgtaggcggtcatcttggcttttaaatttnacaac

SEQ ID NO: 7336 - DNA, 281 bp, Homo sapiens
  misc_feature (1)..(281): n=a,t,g or c
ttttttttgttcatatgacatactttatttccaatctacaaccattaaaaacgctttataagtttacactgtacagttattctcatgtctgaaataagacacaggggcagggagagctggtggattggactgcagttgtcctagcacccgatccatcctaggaaggagccttttgaagacagaagtggaaaggagagaatagtggacaagagaggtggacagttggcccaaggatgcccttggtcccttccctcccatgggccttgcctgggggtccccca

SEQ ID NO: 7337 - DNA, 428 bp, Homo sapiens
  misc_feature (1)..(428): n=a,t,g or c
tttcatnttngtttntttaatgagacaaaaacttgattcttagttcatagccatacaccaaaatgttcagcacaaatactcaagaaaaatgagatatccaccaaaagaacaagtcttattttctacttccatacttagattttcttcttaaaactttaaacagctcagcatggcaatagaagatgtctgctgaagtgggtccatattgttccaagtgtgcctgcaggtgtgtttacgtgtgtaaatgttttaccaatgtcctttatgggtgggtcccctgggtgattacttnactcccatgttgcttccagctaaatnagatttgaatagtattactgcattttaataggaagatataaaccncttttattctggaatactttggccattatgatagggaaaanggaataaataggggnttaaanggg

SEQ ID NO: 7338 - DNA, 309 bp, Homo sapiens
  misc_feature (1)..(309): n=a,t,g or c
tttttttttatagagagagatctacttcagggctctttattttgttccattggtctatttgttcattcttgntcatcgaacattctggttcattctaacatacctgccttaatgactacagtacaacttgttcacattaacaaactcaaggagaaaaacatcatatcaatgagccaaaaaggcatctgactatatttagcagatatttctaataaaaaaaaagttaaacaagaactgagnacaactgaggctacaaaatctatttatctcagnacctagagtaaaacattacaccaagtaatttttcat

SEQ ID NO: 7339 - DNA, 274 bp, Homo sapiens
  misc_feature (1)..(274): n=a,t,g or c
gctgtnaantannttatgatcaaaaagtttaataacacatggtatcgttgaaggcacaggaggaaaaaacagtctcttacagagcctgtaagattataaattagcaaacacacctttctctagagggaaatttggcaacatctacaaaaaatatttagatgcactttctatttctagganttataaaactactggctatatttagacaagtgcatagtgatatatatcacagattattctctacaggcaatgttttcaacagcaagaaactacc

SEQ ID NO: 7340 - DNA, 435 bp, Homo sapiens
  misc_feature (1)..(435): n=a,t,g or c
ttttcgttttaatatttnttcactttatttgtgaaaaataaagccaaaatgccaacaacttccaagaaggaaccatttcatcatctccatcccctcagataaaacctcaattactggtaattgtacatttccatcaatatcccttttaaagaggtttattctgagganttactgagaccaggagctttaaaagctncaatttccctaatcactgagaggcaatcttgaacttctattgaacttggaaagcggtcaagactcactccataataagaagttaaggactgtcactacttaaggtggaaacctattcattngcagaaatagtcctctttctaccaagaggctaatgagcctcccctccccttcccctctctaaaataaaatcagtttggccttctaaaatcaaataacagttngccaacaaattagggt

SEQ ID NO: 7341 - DNA, 507 bp, Homo sapiens
  misc_feature (1)..(507): n=a,t,g or c
caggattcattttttcgtgtttctctccaaatctgaagtttacaaaagtagccgagctgctcatcagggatatgcaagtctgctttctgcagcagagaacagaagtgaaagggagaagggatgagcaagaaagtctctggatttcaggagaaggaagacagccccaaggnagggagaaacacttgtgaagggtccattgaagagacagagagggggcagctctggcctctctgctgccacttccctcattcgatgcacagcggtggggctcacaccattttccactcagcctcttccgcacaacctgcacatctatcgtttcttcaggggctggagctggttccacgatgcctagccaaaatcaggagggggtcctgggggccagcgactaccactgtgaccagattattataaagatgggggaatgtggcttaaaaaagtgggggaaaggacccattttccaaatngcaattttttcttctattgcccccctcatttgcacctttt

SEQ ID NO: 7342 - DNA, 253 bp, Homo sapiens
  misc_feature (1)..(253): n=a,t,g or c
cccttctctagctgaaaaacttctacttaccttttaagaccctaacatgtccacacaataacagttttctatactcctcgccccagcagtttaatcccagtcatttatgcagacaaagtgtgctgctcactcttccactgtgagcatgcttatttcacatttgggttgaacaatcaaattcgtgctaacttaggaaaggggatttttcctctgggacattaataataacctcattcctccacacactaatcga

SEQ ID NO: 7343 - DNA, 402 bp, Homo sapiens; identical to SEQ ID NO: 7054
  misc_feature (1)..(402): n=a,t,g or c

SEQ ID NO: 7344 - DNA, 468 bp, Homo sapiens
  misc_feature (1)..(468): n=a,t,g or c
tacggtaggtaataagatttactgaaaacgtctcggccacattcagtactggtttggtggatacatcagaaggaggttgcataacattaggcaggtggaggggctgagaggaagagatgtgggcacctgtgtgcagtgtgtccgtgctgggggacgcctgtccaggtggtgagtggaacgntgtgtgtgtgtgtctgtgtgcgcgtgttaacaagaaaaacgaaccagaaaaggaaatgcattttatcccactgcacattgcaaaagtctcacgccaaaaaagctagactttcctctatgtatggcatcaaaagggagtaaaaaatgattgggatcacccagattataaataaggttatttgtttctcaaaaatccttattaaaacattaaatatcagctctttttgggggagaatacattcatttcagggagacctcggaagagtgaccatccttttgctctacccg

SEQ ID NO: 7345 - DNA, 440 bp, Homo sapiens
  misc_feature (1)..(440): n=a,t,g or c
tttgagaagcttaagaagattctgtggttctcacagagttagactttattagataaggggtttcggctaccctcaaagctctcaggactggggctagggtttaaggaaggcttatttaaatatgggaaataaaatacaaaagggccacacccgatgcaaaagactttgctggctttctggtcagacaagcctagagatgtgtattttcttagggcagtaaaacaaaacgttttcacaaggaggctaaatttctatcctgaagttcataaacatgtggcgctcggttaatggtaaaaatagacaatgtgtgaggcgggaccntcctcctcatcctcccaagctcctctcctacccacctcccttccctccaaggaaacgcaaagttgccccgaggaggtgggcctggctccanatcgnccccaggggtcaaggtatgtttc

SEQ ID NO: 7346 - DNA, 264 bp, Homo sapiens
  misc_feature (1)..(264): n=a,t,g or c
ttatttattgtaagacatcatttttattaaatacactgtagtacaagagactttccatgtcaggttgagagaagctggtcacatgatttacaaacaaaacttttttttttttttaaacactgtattcacggtgtcactttgaaatcagccaagatgcagtgggtcntagtaaagcaatggacctcaaaacagattgcaaaacaagaactggtaagtattagcacagagacatcacattaaaacggaagatgagccaaatggaaa

SEQ ID NO: 7347 - DNA, 384 bp, Homo sapiens
  misc_feature (1)..(384): n=a,t,g or c
tgtacaagggattttctacatagataatcatatcacctaaaaatacagacaattttatttcttcctttagtagtgcttttcatttcctcttcttaccttactgtgttggctaggacttctaggactatgctgaaaaggagtggtaggagcagacatccttgcctagacaagcgtgccattccctaggaagaaagcagtctctcacaatgaagtatgatgttagctatagatattttacgatacgttttttaatcaagttgaggaaatttccctctattcctagtaatctgagttattataagtgaattttgaattttattaagcaccttttctaaatcgatatgatcatatgaattttcntttttggctcgttaatatgggaag

SEQ ID NO: 7348 - DNA, 338 bp, Homo sapiens
  misc_feature (1)..(338): n=a,t,g or c
tcattgataatgcttttattaaataccaactcgctgatgttaagatatgagcagatattaatgacttttccattctttatacaatttttctcaagtataaatgctttcctgtgcaataaggtatgagaattaattaaatgttttgtcacatttgtcacacttctgggagttttctccagtatgaattatcttatatacaatcaagtgtgacaaccgcttaaaggctttgtcacattcttcacatttctaggatttctcacccatatgatttcttttatgtctagaaaagtttggggtgttgtcaaaagcactggtcacatctttnaggtttggatggg

SEQ ID NO: 7349 - DNA, 262 bp, Homo sapiens
  misc_feature (1)..(262): n=a,t,g or c
cgtttctcttgattttattgatcttttaaaaaaataaaaggacatcttctgtggatacaggttaggatgtttctagggtaagaaacccaccatcgcagcgtaattctctgcggaatttcagtagcacttggaaagttctgttttcaacctgaaatttttgctgttcttccagaaaataacttagtaacaaaatgaaggccgtgaagctgcaggcacactccagaaattagtgtgttcttttaactcgtgtcccaaagagaca

SEQ ID NO: 7350 - DNA, 439 bp, Homo sapiens
  misc_feature (1)..(439): n=a,t,g or c
ttctctttgcttagccagcttcatcagtggtgccctaatgcaaagactagaatactgctttctaactgctcactaaattacatcctaaaataaagtacatgtttattgtccaaaagcaccatgcactatcagtcctctagctataggcctctatcgtttctcgcttagctaaggaaaaaaaaatccttttaacttactaccaaagatcattcaaatcacagccaatagatccaaattaagaatgaatacattcagaatgtctgcctactgtcagtaccagtttttgttatgatggctgtcaagttttaaaatgtgacaatggggaatatattttctgaataaggttattcccctgaggtaaaccctttaggaaatccagccatcgctatggggcaatggnggttccaaatgatgaacgctcttcacacttgaaagggtg

SEQ ID NO: 7351 - DNA, 329 bp, Homo sapiens
  misc_feature (1)..(329): n=a,t,g or c
accatgtaaagatttcagtttattccattaaaaaaaaaaaacacacaaaacacctactggaattacacttaacaatggcgccctctagtgggccactgcaaggaaataatcaccaataattgcttttagataagacttttgtgttagttccacttaataggtaatcaccattcagncagatactggnatgaacagcatggggctggncaggctggggagacaccaagtgagggaggggtaaataaggctgacatatgggccctggggggaaaaccaaacccagctacttcagggaggctgaggcaggaggnttggcctgagccccaggt

SEQ ID NO: 7352 - DNA, 376 bp, Homo sapiens
  misc_feature (1)..(376): n=a,t,g or c
gtttaattgggggtgaaagggtgctgctgggactcaaggatacttttactgcagggtttccacaaaggcatcaaactcgcggacattcttctcatgcacagccagcttctctggtaatgagtccaagtcttcagccatgggactgtgcctccaatatctatggagaggctgctcagctgaggtgggttctgaaactcccgatagaaggtccccgggtccatcggaagaatgtcatctttaggaaaaagctgggtttaaagtctaatcataacaaagtcatcagggggtatttgcccactgcntgccccccnttgggagcccatntgaagttcaaggctttccccgggggnaaggnagaattcaagtttttgggggg

SEQ ID NO: 7353 - DNA, 444 bp, Homo sapiens; identical to SEQ ID NO: 4721
  misc_feature (1)..(444): n=a,t,g or c

SEQ ID NO: 7354 - DNA, 299 bp, Homo sapiens
  misc_feature (1)..(299): n=a,t,g or c
tttaaaaanttttttctcatttttattgattcaaaatgtcattcaatatgtaaaccagtttgacaacttgaaattcagggcattaaaaaatactccagaggactaggcactaattagcctaagaatgcactctgtcctagtcactgtatcctgagttccaaccccaaagacctctacctactgttaaagcattgaagatactgacttaactttgtcaaacatcttttgagngcaatcaatatatttcattttgaaggtcaggggtcattttgcctgttttacattcagaaggaancaga

SEQ ID NO: 7355 - DNA, 372 bp, Homo sapiens
  misc_feature (1)..(372): n=a,t,g or c
caggtttttgagagaaaagcgattccaacttgggatgaggacagagtcaattgccatgcttgttgccactgttcagggaagaagctctaagttgttcaaataattaattagtgcaagtgaagcaggaagagcacgtacatttccgctttattcaaatattgcataaatacagagcagttgggcacatccattctaaggcactgttctggtttgaatgcaattccacaagagagaaaagagaagccattacattctgtatttttcatctctacattcagactcctcctatattatatgtttattgctactggggatatcaatttgagccccagacttatagccagcatcatatgttgaccccggggtgacagg

SEQ ID NO: 7356 - DNA, 253 bp, Homo sapiens; identical to SEQ ID NO: 4030
  misc_feature (1)..(253): n=a,t,g or c

SEQ ID NO: 7357 - DNA, 249 bp, Homo sapiens
  misc_feature (1)..(249): n=a,t,g or c
tttgtatttagcaggtactataattttataattaattttacaattcatgtagcaaatggaaaatcatacagagaggccaatgtatataaataagagtttatacagaaactgccaattcacaaaacagcactgcatggtttctatattgcaagcacaagacatggtcacatggttccactgtacaggtagaaacaagcccacaggcaatacatagagtaccacctgtaacgaggcccttggagctgctca

SEQ ID NO: 7358 - DNA, 398 bp, Homo sapiens
  misc_feature (1)..(398): n=a,t,g or c
acagtttatcagttattacaatgactttttaactttttaaggttattcctccaaaatgctttacccccaaactgcccttgctgtaatgacaattattgctgtttgcagttaatactggtacagtgaaatgtcccagggcagttgtagggtcaatccaatgaaagtagctactgaaatttagtcatcagttacctttgcctgcttagactgactagagctggattcaaaggttgcttaaaaaacctgtcttccacataacaaagtgctgctctagcacaacctgagaactaccctggccacagtcccttccaaaataaacctacaggactttattctagcactgacctnttacagttatgccatcccttgaaataactttttaggaatgtcggattctg

SEQ ID NO: 7359 - DNA, 399 bp, Homo sapiens
  misc_feature (1)..(399): n=a,t,g or c
caaacccagctcttttattttatcaccacagtgtattttacaagcttaaaataagttgaaatgaattttcccagctaaagtagtttgccattaggaacaaccaacatttctcaagtctcttgtaaaataaaaagagcatcangtgaatttaagtagactaatcagaacaatagaagaggcaggaggaggagataccgtctctgactctctgaatgaaaggagacggggtttacaaaggagctttggaaatattatacacagacaactagagacaaacatcaaactgganttctaatataggantnttgntgantcatgagtaaggggacttattccaccaatgaaactggcangttataagtgnacagagggctttcactcataactaagttagcgnca

SEQ ID NO: 7360 - DNA, 505 bp, Homo sapiens; identical to SEQ ID NO: 4033
  misc_feature (1)..(505): n=a,t,g or c

SEQ ID NO: 7361 - DNA, 522 bp, Homo sapiens
  misc_feature (1)..(522): n=a,t,g or c
ttttgcaagttgaatatttatttaaaaataaatctcaaaaatatctattgacagtacagtaagaggggcatgtgcaaacaacagaaagggggaagtcagtcctgctgtgggaagcccacacatcagtgtgttggagcaaagttcacgaaggccatggntgactgagctgtggtntacgaaatgacattcagctaatactggactcggttcacctttgacacctggagaggtngggaagccagggggtggggagtccagctggggatccttgtgtttaggaagggggcngccaagggatgagcctttnggaagaggccccgttnttgcaagggagggctcatttcacaagccaacaggccttntagctcgccgctccagggtggatnttttggtgacctgaanggccctttcccagtccaagttggcttttgcaattggganggttaaggttcagcgangggtcccagagacagaaatnctttttaaaaggaaaaaaccaaanccaacaantcaantcaaaat

SEQ ID NO: 7362 - DNA, 361 bp, Homo sapiens; identical to SEQ ID NO: 2559
  misc_feature (1)..(361): n=a,t,g or c

SEQ ID NO: 7363 - DNA, 441 bp, Homo sapiens
  misc_feature (1)..(441): n=a,t,g or c
tttcnnaaaaaaggcttatatttacttgatttgaattttgctagcatgctttttcttctgaattcaagtgactagaactgaaattattccacctggggagaagagacagctgaaancaatttagtattggttttcaaatacatgaagggtactcagagagaggatgattgccaaagaaaatggtctttgaaccatagaaagaatctgagcttgctctaaagttaaatttccngacttacagagtttatgacattaaactgagagaccaagggatcctttttggagacttcaaaaataggatagatccttaaatgcctgaggatggcttgggatgtggctttgtctgaagtcaggagggataaatcttaccncttgatgggcccttcagggcgtgtgaatctatggggtttgactgggcatgtcagaagctaggantgccng

SEQ ID NO: 7364 - DNA, 451 bp, Homo sapiens
  misc_feature (1)..(451): n=a,t,g or c
naattgagtttcagtgttagagaattttgttttattgttttggtggcatgggcataattggagaaaccattggggtattcactagtaacctacattgttagtttccttggttccagcaggtaatacactgggttccgtcaccctggagatggctacggggaggctgagtgacttcccaaagtaataaagagtttgggaatcaganttccagggtctgactcccagcagactgttctatttccttacanacctgnactttcatcaatcttctccagctacatttcttgtgcccctttcaacagcatctgcagggcagggatgatcttttcccggattaaaaccagttgcaggaggttccctgtttgcttcccttttggggtttttccccagggggagggggaagnacagaggcagcttgcattcacatgggccccatttnccctctgnttcc

SEQ ID NO: 7365 - DNA, 576 bp, Homo sapiens
  misc_feature (1)..(576): n=a,t,g or c
taccttaaaaaaattttaattttccccaaaatataaacaaagaaaaaacataaattggatcataatgcatatgctcacatgtgccttccaaatcacacttgttatgtagacatcataaagaataaaagttacccattaattatatggcatgcatcagcagtgcattggtgggcttaaacttggttttcagttatgtgtatatacagataaatctcttcctgagttgagcttcatcttcagttgagacccaaatcatttgctttcctttatttggcaaggtacttgaccatgtgataaggcaatcaaatgtttcaatctccttcccttttcagcggcatggccctcctctgtgagatcaccaatgtgacaggtatgaggacagaccctaaaatatggtcctgtaaaactagagcaggtttccttgntcattagtctcaagggctacagactgtctcttcatatatttggggatcttgagggtttcagttggaacagattcaaaatgggtctcctttttccctgggttgcccaaaganttgaggtttccnagtagtgacggtttaatgggaaaaacac

SEQ ID NO: 7366 - DNA, 539 bp, Homo sapiens
  misc_feature (1)..(539): n=a,t,g or c
catttctaacagtttattgtataaagatgttactcttctatttactgttatatactgtaaggccttctttaggcctttagctctgttcctccagtaataaaaaagttaaaatatgcttcactagtcacacattccccataccatttcngtgttattcacattccccgtaccatttcttgttattcacatgtacagtaaaacaattgtttcttaaattatttttattttggttctctcattctcttccctatttatcctatacagtgtctgttacgattgcctacctctttcgctatcctatagcgtcagagacttagggttctngggtaagcccaagtctgctactgccaccgtgcagtgccaggcatattaaagggcatgactcccaacatgtaaaatgaggaagctaaactggaatgaaattaacaataaaatgatctttttttatgggttcttagggagataactataggcttagcaaaatttcagagggttttggtaaatgaaactgggttcaacttcagaaaaacagccatttc

SEQ ID NO: 7367 - DNA, 380 bp, Homo sapiens
  misc_feature (1)..(380): n=a,t,g or c
acagtgatttatttttattgaaaatacaaagtaatattaaagaaaagatttaaataaataaagtcattccatatcccgctacactaacacaatgaatttgttttgcagattaccttccacatgcataaagattttacaaagtcacaatcatagtatgcatactattttgtattgtgctcattttacttaccatatcaaacatgtccacgtttctacagtcttccaaataattattttaatggcagtataatacttcactatttttcttatcccactttcttgacatggagtttttttccccaatttttgttattataaagaatgcagacataaatgtcttcatgcatttatcttttttctggaattatttttaagggtaa

SEQ ID NO: 7368 - DNA, 396 bp, Homo sapiens
  misc_feature (1)..(396): n=a,t,g or c
cattttgaaaaatgtttatttaccttaccttttcttggccaagtcaattgctttggtcatctgcacaaagattctaaacactggctttcagcatttctttttccaagcaaatgaaatttatcataacaagacagagctctgattttagtctctcgtcggagtctgggctctgatgacctaggctagtcatcatctaagcctggaatgactgtttgggacccccatggccagcttgaagctttccttcctcagccactctgggcccctgaagaggtcacatgcatctgtggcagagactgtattataacaaagttgtttaccccaaagtcagcaaacacatgttacctagaacttcatcccaattgtaggttgctcaccagacagggttacacgatg

SEQ ID NO: 7369 - DNA, 357 bp, Homo sapiens
  misc_feature (1)..(357): n=a,t,g or c
ctcgggaaactnggtttaataaggacaattccagaggggcctggctgtggcaaaagctgtgccaaacggttgggatccagagctaaaggcacttcttgccacgtgagaccatgggcgaggctccccacgctatctccaccaccacagtcatgagagccaagcgacgactggcctgtgctcggcggctccacagctgcccagctccacctccggcatttactggtctcatcctgagaggcattgggtgcccactcactggctggatgctgggctggttcatgggtggcagagcagggggtataccctttggggatgtcctaaacccttcaggaccaagaggcagcaccaagcagaatt

SEQ ID NO: 7370 - DNA, 532 bp, Homo sapiens
  misc_feature (1)..(532): n=a,t,g or c
ttttaccctttaagcctgtttattcccttctgtcatactcacaagcattttttatcctctgtgaagaggttaagttacccacccaccaagtctttgctccagcagcttgtagtgacccactgaaataaaacagaacatgggaggttttaggtgttgcaaaggatataaatacaagggcagtgattagtagccttctgttattagctaataatgcagactttttcttggataaaatggagtccagggtcccacattaaacggaaaagggccctgatttcaagggtgatgtgatacgatactatgttggtcagtcagttcaggaagggagatgggctggatatccctcagagacagaagaaattttgtatgcagaatcaaagcatgacagaggatgtcagagctgttacgcattgttagctaaatcattgggaacataagcagtggaactggagggcttcaagttcatgtagatctggaaacctgcntaatcctttttggganaatgttattgcagaattccncccccttaagg

SEQ ID NO: 7371 - DNA, 265 bp, Homo sapiens; identical to SEQ ID NO: 3627
  misc_feature (1)..(265): n=a,t,g or c

SEQ ID NO: 7372 - DNA, 334 bp, Homo sapiens
  misc_feature (1)..(334): n=a,t,g or c
ataataatcattttactaaagcaaagattaagtacacattttcccaacataacaatttcatctatggataggcattagctacatgattttncattttaaaaccccacaatgattatttttcagacataaataaaaaatacactggttctagatgccaacaaaatcacatttgcaaaccttaagagtttggtaagttacaacattaagatgactaacgatatgtgtgcagtattctcagtatagaatacccaaaattcccgtgtacatctgtgttgcttgagtgtcccagtatgggaggaggtagacttggcacatcgaaagccactgctatact

SEQ ID NO: 7373 - DNA, 203 bp, Homo sapiens
  misc_feature (1)..(203): n=a,t,g or c
ctcattgtttaggattttctttttattatcaaatctctgctatagaaacactgaagaaaatgggaaaaaaaatcactggagaggcagcataaaatggtggctgaaaacaagaactctggagccaatctcagctctactcccttactagttgtgccccttaggtaggatccttcaacatctctgcttcagcttagccatttgta

SEQ ID NO: 7374 - DNA, 493 bp, Homo sapiens
  misc_feature (1)..(493): n=a,t,g or c
taaatgcatgagtattttaatagaaaaaaatattaaaaacaaaaccaaaactcgtatggaaagaggcttctgactaggccctcctttctagcagtgtttggcacctgataacaatttgacgctgggggagggagcagcttgacaaggtccacatgaagcagccttgagatttttcgcccacttccatttctcctcagcatcaaaggaaagtgcatggtaagaagtgaatcagacagcgagggatctatgcagttatcctgtgaatgtgtggcaaagcatcatggacgcaaacctcctgtcttgagtccagagctgtgtgctttaagatttgaccccagtaaagacagaatccttccaggctcgtcccttcccaaacctaaggggctgtcctttggccacttttcaacttgaagctggttgagcagtctttaggatatgtaacagcctatttttttggacgatataggaaccacgacctctttaaagtctctaa

SEQ ID NO: 7375 - DNA, 394 bp, Homo sapiens
  misc_feature (1)..(394): n=a,t,g or c
gaggctaatcacgtatttattttttcaaaaggttaaatgtaagcttttcccaactgaaatatatagaaaaccccaatgtatgaaacaagttttaggcattggtgttggcagcggtagtgggctgatgtgtcctccctgcacacagctgggggcatgtagcccttcccctctgggtgaaccctggggaaatcttggcaccctcagcctcactgccttccaatctcagctcaaagactgggcatcctgcctgggaccacggcccccccccccaatgtccctcaagggagtacaagaagtcaccangcattgactgcccatcctgcgtgtcctccttttcaggtaaaataaagaaggtaagcntagcttggggattttcgcgtgnccgaaagttnaa

SEQ ID NO: 7376 - DNA, 333 bp, Homo sapiens
  misc_feature (1)..(333): n=a,t,g or c
ccatgaaaattcagtgctttaatgtatctaatatcaagcaggtgaacctgataacacatacaaatctccatttgtgaattaaaacatttccttcatcatttggacttatcacttaattgagaatgttctgcactccaaaatactgtggtttacattccagttgttcatgacaacagagcttaatgtccagttttaattaataaaagtcttgttggcaattagaaagattttctataggcaggaaagatgaagtgcaaatttaccatgaatgntctgaagcaagtatttcccaacttctatgcctnagtgggnaaaagttttttgggggttacc

SEQ ID NO: 7377 - DNA, 448 bp, Homo sapiens
  misc_feature (1)..(448): n=a,t,g or c
cttcagtctcaccagtaaacataagaatatttttggtcttctccacatactgggcccgctgttccaaaagtttcttttgctcttccttttctctgagacgtttctcttcctgttctttaagaagtttctgccttaacagctccttttcttgctcttgcttggcccgcagctcccgctcttcttcatcttgtttgcgtgcccgggccacatggtactgggcctggctcagtaagtcagaacactgcctggcttctgtagcagcaagggccaaatcaaatctcattttatctcccactttactcaaataactgaagtatctatgtgcaagctccagttctttcacagcattaagtacttccttcagattacttttttcatctttcaggacagaggtagctaatctttgcaggaccaaggccaacattaaacataagaactgtatcactgg

SEQ ID NO: 7378 - DNA, 428 bp, Homo sapiens
  misc_feature (1)..(428): n=a,t,g or c
tcaaagactgggtctcactctgttgaccaggctgttctcaaacttccaggctcaagggatcctcctacctcagcctcctgagtagcttggactataggtacgcatcaccatgcctggctatagtaagttttgaaatcagcagtgtgagacctccaactttattgcttctcaggattgttctggctaattgagatccctttacgttccatacgagttttagaattagtttttctattaatgcaaaacttgtcactggaattttaatagggattgcactgaatctgtagatttctttgggtagactgaacatagggtatcttcccaattatatgtgccttctttccgcattttccaagcaatgtttttgtagttttcagggaacaagtcctttcacttacttgggtaangtttattggcnaagtatttta

SEQ ID NO: 7379 - DNA, 532 bp, Homo sapiens
  misc_feature (1)..(532): n=a,t,g or c
ttgattgatttaaaatatattcaccctccaactgttatctgttacattttttaactttttattttcttattacttcatagtggcagtatgttgttgactcagtcaccatatcagtaatagtgactctatctctccaatgtccttggacttagcaaaatttactcgttctccatttatgcgtggtcccatggccatgaatggcttgactgggttcctgttaagtctccttatgctagtctcttttcagtcttgaaagtcttagccctgcctctgaagaattaatgtggatcctttcacagctttcacctaggtcatgaggtttaaattgttggagaggcccactgtgatatgattgtaagagtcaccatgccatttttacaaccttgagttataagtttcttgtaggtgcttcactagcctcatgatatgccttgccagaagtagcgcctgagatggagatttgggtgcaggtgatttattgacgatgtggttcttcaggaaaaatactttctattcacattttcctcgtgcc

SEQ ID NO: 7380 - DNA, 415 bp, Homo sapiens
  misc_feature (1)..(415): n=a,t,g or c
attttattcctccaactacgaagacttgtttctgggcatccaaattttcataaaccttgaagtgggcactgacgctgtaaatgtaatcctaaaataatttatcttccttcaaaaatctctgccatcgtgactttacataccacacacaaaaaagaatacctggaaataattcaaatgtataacaacaagtgtatgtcatacataagaatactatacagagtttaaaaagaaaactagatctacattgttaacatgaacgaatattcaaaatgaatgtgtgaaaaatgcaagctgcagaatacatgtaagagtatgacatccactgtgtaaagtttaaaaacacacaacagnctacatattatttatggatacntacatatgcngaaaagggtattaaagcatggtacacaaagga

SEQ ID NO: 7381 - DNA, 279 bp, Homo sapiens; identical to SEQ ID NO: 2582
  misc_feature (1)..(279): n=a,t,g or c

SEQ ID NO: 7382 - DNA, 615 bp, Homo sapiens
  misc_feature (1)..(615): n=a,t,g or c
tttttttcagtgtccatatttcaaaaatttatttatctcaaactgtgcataatggagtaaaaacttaagttgaaaatgtacctgttataaggatgatattagttcaaatatatacatggattctcggcagactgattcaaataatacagagccgaatcttttaaaatacaactacggaaaataaaggggggaaaaccttaaaatatcacaataaatttacagaaatattacaaaccataagaaaatatttcaaacacagtaatttcatggttttttttatctgaacaaaatggaaagttgggatcgaacaaaagctattataaattaccaacggtgtncaacctgcatggccatttttgctttaacagtaagttataaaatttagtacagtctaaaacttttggcccttttaaacaagacccngagatggttcgccgtactattctaattttttcctttggacaatttttaaacaattaaatgtccaattgataatttcctctttcacgttgcaaggccnaattcagcggngaatccaaatcngcaggagccntcctgaaaaattggnaaattcccgctttacaaaggcattggatgcnggttncccggnaaaac

SEQ ID NO: 7383 - DNA, 454 bp, Homo sapiens
  misc_feature (1)..(454): n=a,t,g or c
gaagaccaggaaaacaacaaagctcatgtatttcaccagctggaaaattcatctagtaaacaggctgtttgaggaaatctcttgacattggaagcatgatgcacacacgaccttaaaaccctaccaatagctctgatggaggaaagaagggaacctgagctagcacgttggtattcacgagggctcttctgtcctgaattggtcctctcatctctgggaaagagaaaagtgtccctaaaaaccacaatagggatgagatgtgccttcctagattcaagtagattcagtctgagacagcaattttgtttttatgtaccaacagaaaacctaaacaagcaggaaataaaagctacttccctcactaaagatatattaagggccaaatatttgttctaaattgattgctaagtctattagatattttgaaaagaaaataaacccccgactatttaaa

SEQ ID NO: 7384 - DNA, 317 bp, Homo sapiens; identical to SEQ ID NO: 7092
  misc_feature (1)..(317): n=a,t,g or c

SEQ ID NO: 7385 - DNA, 460 bp, Homo sapiens
  misc_feature (1)..(460): n=a,t,g or c
caataacataagagtcaggagagttgggaggtatgtcctagggatgtgattgactcttgacatttaacaactttgaacaactgtgtgtaaagtcacagacagaggaagcaaggatttttgttatcggaggacgtctctctctctggttggaagtttggtgcttgggtgcatagtcttccagagctgagacaggaaatgtactgtgctgagaaatgggccccttgccagatgctcccctctccttcctctctgcgaggcagaaagtcagaaggtagagattgctggcaaaactgtgaagtcccaccctggggtctcaaccccaactccactgaagggcagcctccctgaccgtgtgtgactaaggcagtaagggtggccggttgatggcggccgggaaaccgagttttcgaaggttcacatggccaagtctggcttctgattctgctgccctgcaaagaaa

SEQ ID NO: 7386 - DNA, 465 bp, Homo sapiens
  misc_feature (1)..(465): n=a,t,g or c
gtgaccccaggcaattttattactttatccctgaacctcagttgcctcatctataagatggggctaataatagcacccatttcataattatgaagattaaatacattaaggaaaacactagtatgtccctagtacctgctaaacactcaacaaaagttaactgtacatactgatgtctcaaacagggacggaatgtttaacacagaaaacaggaggttttagcactcactcgttctcctggctcccgaaatatgagctgccctgccccagttcatccaagcccatcaatatagttgtcctcgtccttaatctccacaggtgttcaatgtgagccaactgtcagatggctttcatttgcacaactggaataaaccatttatgcctagtgttccattactgggaacgctaagcttatgggagttatttatatcttactgctcgaggtcctcaccaagatctgatttg

SEQ ID NO: 7387 - DNA, 258 bp, Homo sapiens; identical to SEQ ID NO: 3638
  misc_feature (1)..(258): n=a,t,g or c

SEQ ID NO: 7388 - DNA, 529 bp, Homo sapiens
  misc_feature (1)..(529): n=a,t,g or c
tgtgatatgcagaatttgaaattttaataagtcagaattgcaaacttgtccactgtgcagaatgcgcaatttataaaatatggtaaattgaacttcaaaaaatgttgatcaagtattcttaattaaaatgttaatatattttaggtctctcatttgaatggatatccatcgttacttagcaaatgcctgaatttactactggtattagcaaaacttgaacatttataatcctgtacagatgaccagtgtttccttgataaagttttcatatcagttctctctgaatgatgttttaaaggattctgtgcaacatttttagctctgatatttaagaaacagattattatatcctttagcaacttggacaaagtgattgatggcacacacttctccatcaaagagatgcttattcacatctacaaanagatccatatgcccagaaagctcacataatattttcnggtgaagatacaatccccttggtttagaactagttcaaaattgccatcctggaaggggtctacaactc

SEQ ID NO: 7389 - DNA, 435 bp, Homo sapiens
  misc_feature (1)..(435): n=a,t,g or c
aatggaagggtgttggggtggcagtttttatccttgaagacctcagatatgctaagtcaacctaagcaaagtatactcggtggaacctagctctgtggggtgatctgcaaaatagagtatcctggtcatgtaagttcaggaaatgctacagactcaaggattatttttggggattcaccatgcacagcacacattgaaggctgaaaagtccttgcagaaaggaaactgacttaactttgtttcttaaggatatttgaccacaaaacccttagtctgcatcacaccaacctgatgcctcctggaacctgtgttctgtagaatgcgtattagaaaatgttggacaacctgtttcattatcagaagtcccatttctgaggacagtgttctctgcctggaaataaggtccagattctcaattccagggacagccaaggt

SEQ ID NO: 7390 - DNA, 166 bp, Homo sapiens
  misc_feature (1)..(166): n=a,t,g or c
tgttttttaaagctctttataatctgctcaagtagaatttctaacacaaaacccttttttgcttaaaaagcagatgacaaaggaaatgtcaaataatgcacatgaatcttcagctattttcctacccccaaatgagatatggggctgcacagcattcattacagat

SEQ ID NO: 7391 - DNA, 409 bp, Homo sapiens
  misc_feature (1)..(409): n=a,t,g or c
gctattgtcaagacattgtgtagtgggaacagacttcaattctccataacggctcactaatttaacgctggaaatttctttaaaatccccagaaatgggatcagctgcatttctgccattacgtccagcatgttctgaggaatgaacattagttgttccctgagcaacactgtcttttgagtcatctgcggtactgtcctctttgacattcctgatatgtacctgaggattccctgaactttttcttcagtgatttttgataggccttggaatcttgagctttctcatcaggggtcagagagaagctagatcttgagacacgacgtgctggctcctgttcacgtatttttcttggaaattcagttgacttccttccactctgaagactttcaatttcatacctgaggga

SEQ ID NO: 7392 - DNA, 266 bp, Homo sapiens
  misc_feature (1)..(266): n=a,t,g or c
tacatgtatcacttaatcctcacaaccacctgaggattaataccatttacctgtcttacagataaggaaaacaatcatttttcaattatgactatgcccccaaacactggtttggatggagccttcactggtatagagaatgaccttcttcccttagactagactctggctataataaaggatggtttaatcatcccctgaagcaatgcataagataatctgcaatgtatcttcacatactgtaccttatttgataggcaagagac

SEQ ID NO: 7393 - DNA, 203 bp, Homo sapiens; identical to SEQ ID NO: 370
  misc_feature (1)..(203): n=a,t,g or c

SEQ ID NO: 7394 - DNA, 432 bp, Homo sapiens
  misc_feature (1)..(432): n=a,t,g or c
tttttttcagatttacaagtttggatgctttattacctaaagtcaaaggggaagatacaaaagctgtttaatttaccaagcaagtgcagcacgcctatggaaagctttggccctttttgctaagctgtcagatattcgaggcagctggccagacggctgtgttttaaatccaggcttaacattttcgaggctgctgaataatgtagatccttttcagtggaacaaccttttccagagcaggtgtgggtttttgatgcgccatgtgcactgttgctggaaatttatagttgagcttctccagtgtgtcattcagggcatccagtgtctgtattttggcaacatttgcaatggcacttgttttctcgaatcctgtttttttggtatgtctttccaaggtgccaatttcttgttttttggaaattctcattcctc

SEQ ID NO: 7395 - DNA, 509 bp, Homo sapiens
  misc_feature (1)..(509): n=a,t,g or c
ttttgttgttgctgctgtttttactcggacaatgcttattttacagcggaattgacaaataaagccttattttacacatccgaagaaacaccatcacaggaggtttgtaggtcggctgtgtgctttccaaaacagcaaaatagattcttcccatccaaccccctttcctcttgtagagtagggtgtggctcgtggggcttcgtctctctgcaggcacagaaactggcagacctggtccctcctgagcgggccctgctcaagggaatggtgccagattttgaacacaggtaaacaggctccttcataacaacactgtgcatttctgtgtcattttgtttattgctcactgagttgttgccacctcagctcttggtggaaaacagtgggtgtccagaaattgctgacacaagaagatggattgcctatggtcgttagggacacagggcagccccagccagatcccagctggtccatgcagggcatcgtcagtagaagctcaacgtcccact

SEQ ID NO: 7396 - DNA, 284 bp, Homo sapiens
  misc_feature (1)..(284): n=a,t,g or c
ggggtctagcgaacacttcttttattcttgtttgaaagtatttttctgcttacaaaagtaacttatacttgatctaaaaaaaaaaaaaaaaagaaaagaaatcacacaatgttaaaagcaaagattcacccatttggccccagaagccctgcggacagagaagagcctatggtcgggttggtggcctgggaggatgcgcctgttgtcaaggttacagggacttgccgggcgccacagagcagggggcaaagttctccccagcagcctcaggaggccccgctgct

SEQ ID NO: 7397 - DNA, 384 bp, Homo sapiens
  misc_feature (1)..(384): n=a,t,g or c
accaatgcaaaggtatttattaacacattttatttggttaaaaggttattgtttggttaaaggctactaggtaaaaagaagcttaaataaacaggaaggtaagttatatgatgaccaaaatgactcaaaaagtttaatgttacaaaatagctattttatgcacatatacctattaataaacattaagaatggacaaatcaacactccatgaaaggccaaagaaacaaaaaaaaaaccttttcattaagcatttcatcttcttgatactatatttctgttttgattccttatgctttgaaaattcagaaaaaccagaatccataaattcacttcatcttctcatcttgtctctgaggcttggctctttaaaatagaaaggagtac

SEQ ID NO: 7398 - DNA, 401 bp, Homo sapiens
  misc_feature (1)..(401): n=a,t,g or c
tttataaagttaatatacaaatgtattctatttttaaaatggcacagaatgagaaaaaattcttcatgctgataagtgcctcattcccaaacagggacttcaaattgatcagattctcttgcaggcaaaagctttgcagcagtctgcatttactggaatattgctctttgaacacggccacattcaggtttgttaaatatatcctcttccgcttctggagttagttggatgttatctctgactggggacaggggtttcttacaaggaggaagcttttcagaatcttttttaaatccaaagtttttccagagctcattgagtttgatctgtaaccccggcttgttctcggcattatgatgctttctcttctggatgcttgccggcttcttgctcagcccact

SEQ ID NO: 7399 - DNA, 423 bp, Homo sapiens; identical to SEQ ID NO: 3655
  misc_feature (1)..(423): n=a,t,g or c

SEQ ID NO: 7400 - DNA, 409 bp, Homo sapiens
  misc_feature (1)..(409): n=a,t,g or c
tttttttggtgagtggcattggctaaaatttaattgtagcctttttaaaaattacaatttcacattttaacagttactttccagcatttaagcaaatacagcaatatatagtggactaaaacaggcaggagtcagaaagagaaagccaatgttcagtgaacgtcgatgggactgagtgctgtggagggtgagtgagacatgcatagtgccagatgaggaagtgggaacaagggaggggggcgggaaagtatttttccacttggcctgcgtcaaggctcagatctggggctggatgagtggggagacgtctgccatctgtgtgtgtacatccctaaatgtgaactcatcagccatttcccaatggaaaaaaaaaaaaaaggtgcttaaagaaaacagctaagactctgcc

SEQ ID NO: 7401 - DNA, 280 bp, Homo sapiens
  misc_feature (1)..(280): n=a,t,g or c
atttcttatttaaatctttattaaaagaaaaaagatttaaaacaagtaacaacaaatttcattaaatattaaacattttaattatcaaagatatttagacaatacgtttctaacatttctgcacagcagaagcacactgattatagagctcagactgtcatgtgctcatgtgagtttatttttggcataamagtatctaamgtcacatttaaacaaatgtgataatatttyvtaacytgatagtacttacctcgtgccgatttcctgcmagcccgggggw

SEQ ID NO: 7402 - DNA, 131 bp, Homo sapiens
  misc_feature (1)..(131): n=a,t,g or c
gatctctaatgaaaaagggatgtctttttgtttatagtcatgtggcaagatgagagtaaaaccagagagcaaacctctataagtgttgagtatatgtatacatttgaaataaaccagaaatttgttacctt

SEQ ID NO: 7403 - DNA, 320 bp, Homo sapiens
  misc_feature (1)..(320): n=a,t,g or c
ctgntgtcagcacagttttatttgctgtggaatccatgagagccggaagcatcgttggggccgtggctagcagagctcatggtgaccagtcctgggcctgaccaatgggtgattacatttaaaaaccaaaacaaaacaaaacaaaataccaagaacagatcacttgccatggacatcagtaatctattggtaatggtgaaaatttcatgtaaatttcccctaaaccataacaaaaactgtcctccttaccccaaaagtgctggaggaaagatggttgcatgacttgacctctctttgaacttgaaatgctaccttcctac

SEQ ID NO: 7404 - DNA, 307 bp, Homo sapiens
  misc_feature (1)..(307): n=a,t,g or c
ggctttttaaaatcactgtttattccatttggtagagggttttattttttnccatacaaatatttgancaattttgaattccccaaaaccatacatagacgataaataccatgctattaaagtattaaatttgtacaaaaatactttacagtttaatacttgtttgttacaaataaaaatacatatttaagtgactcatgatcttttttnctttttncttaacatgatcctgctttatactttctngccctggcggttctgaaatgtgattgaaataatatttttttngcacaaaaagaaaggngat

SEQ ID NO: 7405 - DNA, 415 bp, Homo sapiens; identical to SEQ ID NO: 3076
  misc_feature (1)..(415): n=a,t,g or c

SEQ ID NO: 7406 - DNA, 433 bp, Homo sapiens
  misc_feature (1)..(433): n=a,t,g or c
ngggtaagaacaggctttatttgtaaaaccactcgtgactctttacaaagcaggatacacagaagggaaaaaaatacacagtgcaaaatggatgttctgagtgccacaaggatctgctgaaaaaagccaaagatgtaagatggctgggtatatatgagaatgaatatttcactatattctgattcaattaccagtctcagtgggcccagggatgagcttttgggtgtgggtcacatgggccaacatttgggataacaaatgagggaataatgggtacccgcctcactagtgcctgaggaacagcatgttctgggaaaatgtctctnggagttaggagatgtgttagctttttccattacagntgggnggaatacaatgttttacaccaccgtcccgggggntgggggtccaaagttngggaggtttcctttag

SEQ ID NO: 7407 - DNA, 375 bp, Homo sapiens; identical to SEQ ID NO: 5770
  misc_feature (1)..(375): n=a,t,g or c

SEQ ID NO: 7408 - DNA, 388 bp, Homo sapiens
  misc_feature (1)..(388): n=a,t,g or c
tttttttttttttttctcaattgagagaatatttaattttacaaggcagagtccnccttcttcaataaacatggataaaaatgatccncatgtaatgaagtaagcctttccatactgnggttctttcccagataggcaccacgaaaggtgcttaaggatgcaaaatagccacagatccatagttcaggttgaaagtcacaaacagtagcctttttgagaaacctcaaacaatggaataaaagattttataacctgaaggtaagtagccatttccaaatgtcctttgacctttgaaatatataatgtcttaagttttaccatattggaacgtgtaattattgtgcagtttatccattttaaaagtgaatccaaagaactagagactgag

SEQ ID NO: 7409 - DNA, 463 bp, Homo sapiens
  misc_feature (1)..(463): n=a,t,g or c
ctaatacatgacaccaatggatattttattatagcttcttaattatttaaaaagaataacatttgttagtatacagttattataaacagttaattgtttacattcattatttgtattcaaagaatcctagccgatctgaaggctttcccatactgcttacattcatagagtttctgccaagtgtgagtgcttccatgcatttgaagtcttgaggctgatctgacggctttcccacattgcttacattgatacggtttctccccagtgtgagtcctttcatgatattgaaaagaactggaagaagtgaaagcttttgccacatttgcttacattcatagggtttccttctggtgtgtctttacatgtctatgaaagcaattaagcaagctgaatgctttcccacaatccttacattcatacggattctctctcgtatgagtccnttcatgtatatgcaaggaag

SEQ ID NO: 7410 - DNA, 233 bp, Homo sapiens
  misc_feature (1)..(233): n=a,t,g or c
catggttctgaaaactcttttttattgttattttacaatgtaccatgaacatttattccatgcacatgggtgaaaatcctctactaaaagacagagcactgtagttgggtcaaaagtctgctggtaacaagagtgacacctaaaggaaagtatcagcttaaggttaaagcacataggccggcaaatgcctgccaggaaaagcaggactggcaatattcccatcagagaaatca

SEQ ID NO: 7411 - DNA, 448 bp, Homo sapiens
  misc_feature (1)..(448): n=a,t,g or c
gatacgtttctgccctttgtgtaaggaggacattttctctataatgagtaatcaaaggtaaaagagcacaggtaaataaggctgggaattggtgaatctttctgtgtactcacattatagctttggtttttagttgtctgtaacaactgaaatgaacaaaacaacaaaataaaaaggaaggctatatttaggcagtgtattagttcattctcacactgctataaagaaatacctgagactgggtagtttacttaaaaaaaaaaaaaaaagagttttaattggctcacatttccacaggctgtacaggaagcatcgatgctgggatcttttcttctggggaggccataggaaactttaaatcatggcagaaggtgaaggagaagctggcacttagcatgtttggagcagngggaagatggaggggaggtgctacacaccttttaaacan

SEQ ID NO: 7412 - DNA, 454 bp, Homo sapiens
  misc_feature (1)..(454): n=a,t,g or c
aaattcactacacaaactctgtgattaggtaagaaaagcgatactggcttgcagggaccttctgattcaagtacaccaagaaataagctcctcctcccccaactagatggtattgatcactctgcccacaaatggtacccccttcagcaagaactgcaagcccttcttggatttgccttcatgagaaaatggtggcttgggatggaggtgacattccttgctgtggtgaactgcaaagaaggaaaccaggcaatgtattccatagaggcctttaaagagacccgttggaaatgggccatggtctaatttggtgttgaaataaactaacctctttggctgtttctcccaaactgccaccagccaggcaaggccaatccaatactgactgctggctgggggagctcgtaatgggtgatgccgcctgcttttttgcatatgtcaggttacaggtgct

SEQ ID NO: 7413 - DNA, 574 bp, Homo sapiens
  misc_feature (1)..(574): n=a,t,g or c
tgactgtgggaaatcttttaatgaaaaaggacaccttaggaatcatcagcgagttcacactacagaaagaccctttaagtgtggggaatgtgggaaatgttttagccacaagggtaacctcattctacaccagcatggccacactngatggctaataaggctgcccttctgactaaaagatttcccgcactcctcacagggataagctgtctttccagtgtggactcgctgatgttgaataaggctgctctttcgactataagatttcccacactctccacaatcataaggtccttttgcagtgtgatctcgctgatgattactgaagctgacatatctgctaaaggattttccacaatcactgcacacataacatccatctcctaagtggaaaaagttctggtgtggaataactgagtgtttggtgctgnaggcntttgtgcgttttccacaactggtnaataggttttncccccccgaaaagggtgggccatgcatagtttcantggccggtctnctctaaaggaggttcntcttgggaaaatcctgaactgggcagaangtcccccgggcc

SEQ ID NO: 7414 - DNA, 556 bp, Homo sapiens
  misc_feature (1)..(556): n=a,t,g or c
ttttcacatcgtacatgtttatatctagaaaacgccaagtcaagtaatcagtacgtgaagcgggccgagtacccgatggcctggcccggggtgaaggctgtttagtgaccatggaagtgtgtgagatttcacgcacacgcattcatgtcaacaaggacatcaggagaagttaacattatactgaagtcttaagttaaaacatttctgaagtgtatggaaaggtttcactagctgttacttttctaaagtcccttgccctgtgttactttacccagacgcctctgctctttatcgtggatcaaagtccctggggcttttgtgtgtccccgtcaggcggcgtcgttggcctcagcaagtgccttggtgggcgaatgtgacgttccccccagctgggtcccggactggacagtgtgggtggttggtgccatcgcactcagcagacaaggtgagtgaccccagcccagccctcccttgtcccggtgccatccgggaaggtgctggggaacctgtcctttcccctntggcccggggtggcacctggnaaagcaagcccttg

SEQ ID NO: 7415 - DNA, 423 bp, Homo sapiens; identical to SEQ ID NO: 2654
  misc_feature (1)..(423): n=a,t,g or c

SEQ ID NO: 7416 - DNA, 398 bp, Homo sapiens
  misc_feature (1)..(398): n=a,t,g or c
cctaacattattttttctcccaagatttagaatgtcacatctcatgttcctactagtaatcacacacaggattaaaagcccaaccaagaaagtattctttttataatatgttcttaaaagaagaaagaaaaattaaatgtgaacattttgtacaatagttgctgaagaacagtaaaaccaattccgaaatatcatgtgtactatacagaaaggcatggctcatggaaccaagtattcaacactacagcatttgaatatcagtctttaaaggttggtaatattacatcctgtacacagctctgtgtctctctacctgggctagcgcatgcccaggatctgtctgcttttcagttggtaatttttctcaatatctgacagggcttgagcgcagctgggca

SEQ ID NO: 7417 - DNA, 312 bp, Homo sapiens
  misc_feature (1)..(312): n=a,t,g or c
ctttttaaaaggcacagtttttattttaacgacgctgcattgctctttgatgatgaatctcaattcgactcctcaaactgtcaacactcttgttatcctagattctagaaggggcctcatcttttgacttctttctatagagggccacttctaaagctacagcactcatttggaaaaggacactgggatgaacacgtaagcgttgcaagcacaggggccgcctctcttgcagacaggtggccaaagcagggcttgtgctgggccagaagtggaangtaattcctcgccagctacacattcagtctgactggt

SEQ ID NO: 7418 - DNA, 359 bp, Homo sapiens
  misc_feature (1)..(359): n=a,t,g or c
ttttagcagcaaataaaaatagaaaaagtctacttttatttattggtaaacataagacaaccaagtctgagcatctggtgcagttcccagtgacggcacttgccctgcacacgctcttgaagcaccaggaaaaacacacaacacagtaagaaggcaaagtggctgggagtaaggtatctgcagattcaaactttgggattgaagtagctggtaaacagaaaggcaccgnatcagggtctgganagaccgggcttgctgggggaaggaatcttgggcctgcccaaggcagacangggacaagacatccctccatttnttcccaacaagcttccttggaagnccgagtcanccccaanggg

SEQ ID NO: 7419 - DNA, 299 bp, Homo sapiens; identical to SEQ ID NO: 4100
  misc_feature (1)..(299): n=a,t,g or c

SEQ ID NO: 7420 - DNA, 398 bp, Homo sapiens
  misc_feature (1)..(398): n=a,t,g or c
ttctttgtctctctgttcttcaacttcttgctctgtttgggttcttgtttggcctctaacttccttttcttgtcacttttcaggctgatgatcgaggcgttcggccagctttgttcaaaacttcattccactcttcatcgtccccacggattatgtattcagagaggtccatgctcttcagcttccctacttccttcttgtgtttctcctgaaattcctttgctgcttcatctaggtcgtcactgagggtcttcatcgtgggctccatgaccacatccttcgctgccaccatctgctcctcaatggccttttcctgaacttcattaaataagcttcacaactttgcggatgatccggttgaaaagtcccatcaactggcccgaggnaggctcaatctc

SEQ ID NO: 7421 - DNA, 355 bp, Homo sapiens
  misc_feature (1)..(355): n=a,t,g or c
tagtgatgccagctcctcagtgcggtactgctccagcaccaccacgccctgcaggcctgcgctgcggccngggcacagcctcgcagtgtaccaggtacgtgttgcggctgccattctcacttgtcacgaacaggatgttaaacacctccacatcgcactcgttgcagtagtaggctggctcgtccttgacacggccctggtaagcgattttcttccctgcccgcaccaggctctcgcgttgcacctggcagtgcttcatggactgcagcaggcagaacttgatcatcttgaacaagtcggggtcgctgattttgaccgtgcgagccacgttccatgacacgtgaatcatgggcac

SEQ ID NO: 7422 - DNA, 478 bp, Homo sapiens; identical to SEQ ID NO: 3046
  misc_feature (1)..(478): n=a,t,g or c

SEQ ID NO: 7423 - DNA, 498 bp, Homo sapiens
  misc_feature (1)..(498): n=a,t,g or c
tttttttatagacaatagaaatttatttctcacaggtatggaggctggtaagtccaagatcaaggcactggcagattccgtgtctggtgaggactgctctctgcttccaagatggtgtgttgttgctgagtcctccagagggaacgaagactgtgtcctcatgtggcggaagggatggaaggaaacaaaaccactccctcaagcccttttagaaggaccgtgaccccatctataagagctgtgccctcacgacttaatcacatcctaaagttcccacctcttgttaagtttcaacacatgaattttggggaagacagggataaggaaagaacatggtgattaatgctgtccccctggactgattttcaagctttctatggcaagagtttataggcaaaaacaaaatccgtccattgcatgtttgatagtgccatgaacctctcttttgttgcactcatcacagttgtacattaatctatataattacttaatgctcat

SEQ ID NO: 7424 - DNA, 409 bp, Homo sapiens; identical to SEQ ID NO: 3680
  misc_feature (1)..(409): n=a,t,g or c

SEQ ID NO: 7425 - DNA, 434 bp, Homo sapiens
  misc_feature (1)..(434): n=a,t,g or c
ttttttttttttgaatataatttggtttatttctctttgactctctataaaaaaagaactggaaaaactattgtattaactgatttcaagtatagaagccatcttgaagaaaagacagttacttgagctcttgtatttatcagatgatgaaaagtgcagagaagaaacaataaatacaaatgttcctagtcactgtgtaaatcacatttaaatttgatggggttttctaagaataacactaagtttataagtattaacaatcttttaaatctgaaaaatgttttataaatatgggtattagttaatatttgttatataaagtgttgaattattaactatttctttaaaacaggacagatggcctaattaaatgacaaaagaaaacaacatctttttacattttccctactgatactgtacatatgtaatataaa

SEQ ID NO: 7426 - DNA, 411 bp, Homo sapiens
  misc_feature (1)..(411): n=a,t,g or c
ttttttttttttttcacatttcctggtttattacaaatgatattccaaaggatatagaaaaagaaatgcatatagtgaggtatgaaggaaagggtgcggacttccatactccttcccctttgcaccccccgaccccaggtggcaccctccagtaacatccatgtgttcaggtatccagaagctctctgaacccagtcctttgggagcttttatggagactttgtaacacaggcatgattgattaatccatcagccattggtgatccacttcaccttcagttgccctcctccccagatgttgatggggtggagctgaaattgccatccttctaatcctgctgtggtctttccagtgaccagccccatcctgaagctacccaggggctgccaggcatcagtcaactcatcagc

SEQ ID NO: 7427 - DNA, 133 bp, Homo sapiens
  misc_feature (1)..(133): n=a,t,g or c
tttttttttcaactttttgcaaagcagcatagcaacaatcgtgattgtagcacttgcctgaggttgtggtcacaaccaacgtagtaaacatcatttgcatatcagtaagaaaaagaaaacaggaggagatgag

SEQ ID NO: 7428 - DNA, 495 bp, Homo sapiens
  misc_feature (1)..(495): n=a,t,g or c
gtataaatcttgttttttaatgatgatctttttaaatgctgtgtttcccccccaatagctgcttgttggaatcactgctgcagccgacacacaatctgtgagcctgtttccgcctgccccaggaactgtaaggggtttgaaaacgttttgttggggtcaggaagggaggggttggagagggtggttctgtgtaaaacacgtgggttttcaacactgctataaatatagaaacgtcacctggagttatatacagtaagactttgggttctccatgggggtgggaccaggctgacgggccccacggcaggctggggcgggaggtgggagccagggccactgcgaggagaacgagggtggttggagcatccctgaggcagcaggcgccaggggctgcctcgtaggatgtgccggccccacacgcagttcgttcagggcagcaaccccagctgggtataggacaagaaaggattgggaccagggaaagtgggtgggaag

SEQ ID NO: 7429 - DNA, 454 bp, Homo sapiens
  misc_feature (1)..(454): n=a,t,g or c
tttgaaactccaaaatgataacctttaatgcttattagatggcacaagtgttaggttgggtattttactaaatatttaatcattgtatatgcacatatttatgggcatgtgagcttaatttctgtttttaaattcagaatgcttcaataataacattgcattttatataatcctgattttcttttttaaaatcagctcaaaaggagaagttaaatattcagctttaatttcaccagtagatttttaatgttttgtaatcataatgtttaatttgtgctgttcttagaactttaattatgaagctaaattgtactaatacccattaggtacttcttaattgaaggcacatcatatgtctgatgtggcagtactaattggtgtaattaaattctaatatgcttcagtagcctgatttttttaagtgaataaaaagctgatagaaataagtcagctc

SEQ ID NO: 7430 - DNA, 526 bp, Homo sapiens; identical to SEQ ID NO: 3694
  misc_feature (1)..(526): n=a,t,g or c

SEQ ID NO: 7431 - DNA, 441 bp, Homo sapiens
  misc_feature (1)..(441): n=a,t,g or c
gcagcagcagacatttattgagctcactgtggccggctcccctcttagcccggtccccacatcgctagttcttatagcgtccctatgaggtgggagctgtcgctccactttgcgtgtgggaagactgaggcaccgaggccatgccaccagcccaaagtacagcagacaggctcagaaacaggaggctgcctgtcctccatccccagggcaggaagtaaggccgagctccaaacccactctgccccagggataggctttaggcaggggaaggatacggccaggtcagcacattagaaagtggggccagacgtggtggctcacgctttgtacccccnacacttttgngaaggccaaggcaggagggatcacttgagggctaggagttcaagaccagcctgggcaacataccaagacccctgtctctacaaaaaaaaaaaaagg

SEQ ID NO: 7432 - DNA, 532 bp, Homo sapiens
  misc_feature (1)..(532): n=a,t,g or c
tttttttttagatgacaagagttagcttttattcacaaatgtagttaaacatgaggggtgttttgtagaaactctaatttctacaaacattagtggtgcattttggtaacattgggacaataaataagttatttaattaataatacaattttaagacaaaagataccccaaacaaagcattatctgttgactgcctgagaaacatgaagatcttcaatgttagtacttttctgctccttctttcttaggtgatcatccattggctttcttctactaggttgtctgccaagacttgggtctgaaggctgaagtgaaggccctttcagaaatgcattctggatgccatccttagttccacgcaagaaatgggctaaaatcccatataaaagaggtattgtattatcctttgattcttcaaatgcatttagttcatggatgagaaactgtctgtccaacgaactacaggttgaccagattctgccatgagggacgatgctgtatacttataattggtggaatctaaataccccga

SEQ ID NO: 7433 - DNA, 441 bp, Homo sapiens; identical to SEQ ID NO: 5831
  misc_feature (1)..(441): n=a,t,g or c

SEQ ID NO: 7434 - DNA, 354 bp, Homo sapiens; identical to SEQ ID NO: 2712
  misc_feature (1)..(354): n=a,t,g or c

SEQ ID NO: 7435 - DNA, 172 bp, Homo sapiens
  misc_feature (1)..(172): n=a,t,g or c
tgttcaagaacacttagttcaaagcatcttaatggacgagaaatctgtttccaaaaaatctaaacaaattcagtgtggaaaaggtaaatcaagtaagagtagtaaaaactgtaaactattctttacatgggaaaaataaatnataatcatatttncttaaagtggcaacact

SEQ ID NO: 7436 - DNA, 299 bp, Homo sapiens
  misc_feature (1)..(299): n=a,t,g or c
tttaatataaaaataaaactttattctgtctcatcaaaagctaccagctgctgaagcaaacatgaagggtggcgggggggcagggattctagggccccagagtaagtagaccacactgagtctcttttgggccccctgacagganagcgctgagtggaaggggaggagctgggacccaaaggtcttggcttaggtgtgggagcagagaacatnagacctcatcatggtcctaaatctccaaaggctctactggacaaacaagattgatgttaagagagaggggaatgagtgacattgag

SEQ ID NO: 7437 - DNA, 531 bp, Homo sapiens
  misc_feature (1)..(531): n=a,t,g or c
ttaactctaaagcactcagcaaggctttggactctttctctgtcttgcttaacttatcattaagttgttcaatgtgatgttctcttttcttcaaaaggtcttgagaacaatctcgctgcttttccagatcagccacagcaagcttcagtttttctaaagtcaaggagttttcttgctgatttatttttttcttgaagatctcttaacatggtttcctgagaggtattcttcgctttcatttcttctgcaaaattctggctctgatttaaacactgtttgatgttcttgaggttctgcctccnggggggcagacttctctgggcccttttgctcaggaggtgactcttaagggagggttggttttcccttccttcatttccctcccatggcttctccctcaggctcattctccctggatctggactcgccggggggaccggcctggttcaggctctgcacaacttttggcttaaactcttccaaatggtctcgngccgaatctggggcncgagggcaaaaatcccaanggga

SEQ ID NO: 7438 - DNA, 477 bp, Homo sapiens
  misc_feature (1)..(477): n=a,t,g or c
tttttacantcagaatatttacagaagtatttattttaaaagtagacttaaaaaagaaaagtaatttagattaaaagatccnaggngtattgtttcatgtaggngttactgctaccnatactttcaccccatttattaagcccaaaacacttcaagcaacttcaggntcataaattaataaggaggtacagaagcccaaccaggntgggaaagaatgtgtttcaggttagaaggggacagcatggctcctcaatgatgtcttgtatggnacatttgtgctccactgttaatgaagattttcttcctgaaaatctgaatgtgacattttaggntcctctgggttgttgggtttagnctcccgnattgtaatgggtgtgctgaaggtcaggtgggttgactagaaggtcaatccaagctcctaggctcccctctcttgtagggcctcaattatccacctgtgagggctcagggaggggc

SEQ ID NO: 7439 - DNA, 421 bp, Homo sapiens
  misc_feature (1)..(421): n=a,t,g or c
aaaacaattttactccttattcataaaacagtacatttctattacataggtttcatcccctaggcatgcacaaccatttgaactatttaaacagtttataacaaaacaaatgagaagataagggaaaaagagctctcctggggacttacatagctgtttggtttttcaacttgattgaagaaagttattcgggggatctgtccaattcacaccttctgttccctgatcaaatactttagggtcaaacataaggttttattgatttttgctcaagcaaangaattaacatttttgataaggaactgtaatgggcaattataaggtaatatgggtgtatggtaatattatggctgccagaggaaacatttgactatgattaaattcaagcccagtactggggtagctctagataattaaagga

SEQ ID NO: 7440 - DNA, 2640 bp, Homo sapiens; identical to SEQ ID NO: 4138
  misc_feature (1)..(2640): n=a,t,g or c

SEQ ID NO: 7441 - DNA, 3784 bp, Homo sapiens
  misc_feature (1)..(3784): n=a,t,g or c
ggcggaagcacgatctccggcagcggcctgggaactcttagctgagcaggcgagagcatcatggataccgacttatatgatgagtttgggaattatattggaccagagcttgattctgatgaagatgatgatgaattgggtagagagaccaaagatcttgatgagatggatgatgatgacgacgacgatgacgtaggagatcatgacgatgaccaccctgggatggaggtggtgctgcatgaggacaagaagtactacccaacagccgaggaggtgtatggtcctgaggtggagaccatagttcaagaggaagacactcagcctctcacagaacccattattaagccagtgaaaaccaagaaattcactctgatggagcagacattacctgttacggtgtatgagatggatttcttggcggatctgatggataactcagagctcatcagaaatgtgaccctttgtggacatctccaccatggcaagacatgttttgtggattgtttaattgaacagactcacccggaaatcagaaagcgctatgaccaagatctgtgctatactgacatcctcttcacagagcaagagagaggtgtaggcatcaaaagcactcctgtgacagtggtcttgccagacaccaaaggaaaatcttatctcttcaatatcatggacactccaggacatgtgaatttctctgatgaggtcacagctggcttgcgcatctcagatggagtggtccttttcattgatgctgctgagggggtgatgctgaacacagagcggctgatcaagcatgcggtgcaggagaggctggcagtcactgtgtgcatcaacaagattgaccggctgatcctggagctgaagctgcctccaactgatgcttattacaagctgcgccacattgtggatgaggtcaatggattaataagcatgtattccactgatgagaacctgatcctttccccactcctgggtaacgtctgcttctccagctcccagtacagcatctgcttcacgctgggctcctttgccaagatctatgccgacacctttggtgacattaattaccaagaatttgctaaaagactctggggtgacatctacttcaaccctaagacgcgaaagttcaccaaaaaggccccaactagcagctcccagagaagtttcgtggagtttatcttggagcctctttataagatcctcgcccaggttgtaggtgacgtggacaccagcctcccacggaccctagacgagcttggcatccacctgacgaaggaggagctgaagctgaacatccgccccttgctcaggctggtctgcaaaaagttctttggcgagttcacaggctttgtggacatgtgtgtgcagcatatcccttctccaaaggtgggcgccaagcccaagattgagcacacctacaccggtggtgtggactccgacctcggcgaggctatgagtgactgtgaccctgatggccccctgatgtgccacactactaagatgtacagcacagatgatggagtccagtttcacgcctttggccgggtgctgagtggcaccattcatgctgggcagcctgtgaaggtactgggggagaactacaccctggaggatgaggaagactcccagatatgcaccgtgggccgcctttggatctctgtggccaggtaccacatcgaggtgaaccgtgttcctgctggcaactgggttctgattgaaggtgttgatcaaccaattgtgaagacagcaaccataaccgaaccccgaggcaatgaggaggctcagattttccgacccttgaagttcaataccacatctgttatcaagattgctgtggagccagtcaacccctcagagctgcccaagatgcttgatggcctgcgcaaggtcaacaagagctatccatccctcaccaccaaggtggaggagtctggcgagcatgtgatcctgggcactggggagctctacctggactgtgtgatgcatgatttgcggaagatgtactcagagatagacatcaaggtggctgacccagttgtcacgttttgtgagacggtggtggaaacatcctccctcaagtgctttgctgaaacgcctaataagaagaacaagatcaccatgattgctgagcctcttgagaagggcctggcagaggacatagagaatgaggtggtccagattacgtggaacaggaagaagctgggagagttcttccagaccaagtacgattgggatctgctggctgcccgttccatctgggcttttggccctgatgcgactggccccaacattctggtggatgatactctgccctctgaggtggacaaggctcttcttggttcagtgaaggacagcatcgttcaaggtttccagtggggaaccagggagggccccctctgtgatgaattgattcggaatgtcaagtttaagatcctggatgcggtggttgcccaggagcccctgcaccggggcgggggccagatcatccccacagccaggagagtcgtctactctgccttcctcatggctactcctcgtctgatggagccttactactttgtagaggtccaggcccctgcagattgcgtctctgcagtttataccgtcctggccaggcgcagggggcacgtgactcaggatgcacccatcccaggctcccctctgtacaccatcaaagcttttatcccggccatcgactcttttggctttgagactgatctccggactcacacccagggacaagccttttctctgtctgtcttccaccactggcagattgtgcctggtgatcccctggacaagagcattgtcatccgccccttggagccacagccagctcctcacctggcccgggaattcatgatcaaaacccgccgtaggaagggcctcagtgaagatgtgagcatcagcaaattcttcgatgatcctatgttgctggaacttgccaaacaggatgttgtgctcaattaccccatgtgagtgcgtggactcctgggagctcctgctccctacagtgggctgcaactcctgtacttgaagctgagacctcatatgacgtggccttcgtgttgtcagagagtgtctggaagctgctgttgccatcttgaacaactcaccaacctccaacccagagccccagtgagagaggagcatttggcctcctgcttccttctgtggcctctgccgggctccattcccaaggaaaagagaggagcttgggctcacagaaagagaaggggatgaaaccccaaggggccctatctttgggatttacatggaattttattttctacaagtttgaccttagccatggtttgcaagtgaacagaacattctgacctctgtcttgctctgctcctttcatcctcgtctcccctgccccatctggtgcttacattctgaatatatgtcatctcccaagaggcttcactgcctctgcttccagctgcagcctccttcctgcctgggtccccagggaagccgcctgccttttaattcagtgttcccatgagcgccaaggccccattattgcccccttgctcccactccatgctgcttctgggtgggacctaagatggcttgggagttgttgggttcctgcgatcagaagtctaccccaccacctcctcaggaaactgctgcctcccctaagaatcttccttgccctggagtagggggccagagcactttgatttccagccatttactccaagtcctctccccagctaccaccagtcccttactctgttctcccccagtgaaaaagagtctgttgattttcctc

SEQ ID NO: 7442 - DNA, 6942 bp, Homo sapiens; identical to SEQ ID NO: 4147
  misc_feature (1)..(6942): n=a,t,g or c

SEQ ID NO: 7443 - DNA, 3371 bp, Homo sapiens
  misc_feature (1)..(3371): n=a,t,g or c
tttctcccaacgtgttcttttttttcctcttcattctccctccttcgaggacacaaaagtggcttccgcggaaagatttggaggcggtgggagcttttctccccggagagcgactgtgtagaaaggatttttgggaagccgctttttaacacctctgctctccgtcccccaagcctctgtgtaatcctctgaggagaaaagcccatagcttgaaagttcgggggcattttgttgtgttctgtaggagagagggggaggaccctgttcgggtagtttggccggactggtactggccgttggaaaacccgaagtacatttccgtgtggaacttttgcagatatatatttttagatttttaaataccagataaaaaatatatgccttctatatatctcctggcgacctgcccctgacagcgcgatgtacaatacggtgtggagtatggaccgcgatgacgcagactggagggaggtgatgatgccctattcgacagaactgatattttatattgaaatggatcctccagctcttccaccaaagccacctaagccaatgacttcagcagttccaaatggaatgaaggacagttctgtttctcttcaggatgcagaatggtactggggggatatttcaagggaggaggtaaatgacaaattgcgggatatgccagatgggaccttcttggtccgagatgcctcaacaaaaatgcagggagattatactttgactttgcggaagggaggcaataataagttaataaagatctatcaccgggatggtaaatatggcttttctgatcctctgacatttaattccgtggtggagctcattaaccactatcaccatgaatctcttgctcagtacaatcccaaacttgatgtgaagctgatgtacccagtgtccagataccaacaggatcagttggtaaaagaagataatattgatgcagtaggtaaaaaactgcaagaataccactctcagtatcaggagaagagtaaagagtatgataggctgtatgaagaatatactagaacatcccaggaaatacagatgaagaggactgcaatagaagcttttaatgaaacaattaaaatatttgaagagcagtgtcacacacaagaacaacatagcaaagaatatattgagcgatttcgcagagaggggaatgaaaaggagattgaacgaattatgatgaattatgataaattgaaatcacgtctgggtgagattcatgatagcaaaatgcgtctagagcaggatttgaagaaacaagctttggacaaccgagaaatagataaaaaaatgaatagtatcaaacctgacctgatccagctgcgaaagatccgagatcaacaccttgtatggctcaatcacaaaggagtgagacagaaacgcctgaatgtctggctgggaattaagaatgaggatgctgatgagaactattttatcaatgaggaagatgaaaacctgccccattatgatgagaaaacctggtttgttgaggatatcaatcgagtacaagcagaggacttgctttatgggaaacctgatggtgcattcttaattcgtgagagtagcaagaaaggatgctatgcttgctctgtggtggccgatggggaagtgaagcactgtgtgatctacagcactgctcggggctatggctttgcagagccctacaacctgtacagctctctgaaggagctagtgctccattaccagcagacatccttggttcagcacaacgactccctcaacgtcaggcttgcctaccctgttcatgcacagatgccctcgctttgcagataaagaggaagtgggaagagaggtggtcttctggcatttttttctacagtttttattagactacgatgagggcattctttctacatagactgcttgttttgcacaagaagtgattttgtgaatgtgaagtggagaggccgaggagcagccggccgggatgggggcattagaggcctgaggttctctaggactcagccatgccgctgcactgacatactaagctggaagcagatgttttttttgaaagtctgtttcattggggtttttgttttgtttagccagacaccctcaacagaatattaggcttgatggttatagcgggtggggttgtatttggaagcctctgaagagaccatgtctttttaaaatctaactcttgagagtgcagcaggggcatggctctgctgggagttgtgttttgctttggcagtctctcttccccccacgaagaaggctgtttaggttttgtgatagaatgggatttgatgaaaaagacaaccaaaggaaaatggggaggcttgggatttcatttaaataatctaagccaagatgataaaaaaaaccttcaactgaaggtactttgtttcttacaacataatttaggcttcagcatctcaccagcccctccctctgaagaagtattatgttcagaagccaacaaaacagtttgttgccagaccaatgtttgatgggaaaacgtggcactcatagttgaatgtatacttctgtaccaaaacttgaacataaaagactagaatttgtgagttttagcaaacgctaaattgatcactgtaactaaccccttctgtccttcctgcctgtttctctgagatgaggaatagcattctttttgtggggatggtgagctttgaatcataaaatgaagttggtgcttgtatggtgtttccttagcctaaagaatgatctgttgtttgaaacctttgtaacttgtttgtatgagtaaagaaaaggtgcaatgcagtgcttttagatggcttgatataccaaataacaatatagacaacattattatatgtgcttccccaagtttaaaggccctgcagaaatagtaaacatggtttaatttcccttcatttccccctcctttgctggatggggttttgggagctataggttgctaaggaggggagtcagattgtggtcaggtgcctcagtaaatcacagacccaggggccctgtggtccagggtgagagtcacaccacattacacatgtgcttccatacagtggtttctgaagcttttgcagggagagaagatggcttagtgtttagactgttagtagaagccatctggaagcttttctctttgcctttttttgtgatcctgccattaaggctatgtgcagtctgccctcctgctccagtggccttgattttaggccaggaatcttctgctccatgtggcttaagccttccagctgagtgaagctaggcaaatggagtgggggcaggcatctattcctgcccccatcatgccccacacccatcagtcaacactcatttgacaaatagagtccagctgcctctgagccaatcctgggacctaa

SEQ ID NO: 7444 - DNA, 2637 bp, Homo sapiens
  misc_feature (1)..(2637): n=a,t,g or c
aacatttacaacaaagttgattctgtgtagggttggaggctagacagttccacaaatttttagtcacattttccatgtcagttaaatctagggagttcaagactactggaaaaattagtctcattactaaaagaaacttagagaccgagggaggtaccagagtctaggaggtacctctgggttgcagaagtaattgtaaaataccagacctgttctttttactaaaagctagtttcactatcttctggtctgaaatactgaggcaaatactcaagacttattttcttcctaatcttgctggtgaaacagaagttactagaaagaaaggaagaaaaaacttgatttggtgactgcaggaagcaacacgttgctgcttttattctacagataatgatttatgaggaatccaagatgaatttggagcaggagaggccgtctgtctgcagtgccccaggctgctcccagcgcttcccaacagaggaccatctgatgattcataggcacaaacatgaaatgactttgaagtttccttcaataaagacagacaatatgttatcagatcaaactccgaccccaacgagattcctgaagaactgcgaggaggtgggcctcttcagcgagctggactgctccctggagcacgagttcaggaaggctcaggaagaggagagcagcaagcggaatatctcgatgcataatgcagttggtggggccatgacggggcccggaactcaccagcttagcagcgctcggctgcccaaccatgacaccaacgttgtgattcagcaagccatgccgtcgcctcagtccagctctgtcatcactcaggcaccttccaccaaccgccagatcgggcctgtcccaggctctctatcttctctgctacatctccacaacagacagagacagcccatgccagcctccatgcctgggaccctgcccaaccctacaatgccaggatcttccgccgtcttgatgccaatggagcgacaaatgtcagtgaactccagcatcatggggatcgaaggtccaaatctcagcaacccctgtgcttctccccaggtccagccaatgcattcagaagccaaaatgaggttgaaggctgcattgactcaccaccctgctgccatgtcaaatgggaacatgaacaccatgggacacatgatggagatgatgggctcccggcaggaccagacgccacaccatcacatgcactcgcacccgcatcagcaccagacactgccaccccatcacccttacccacaccagcaccagcacccagcacaccatcctcaccctcaaccccatcaccagcagaaccatccacatcaccactcccattcccaccttcatgcacacccagcacatcaccagacctcgccacatccgcccctgcacaccggcaaccaagcacaggtttcaccagcaacacaacagatgcagccaacccagacaatacagccaccccagcccacaggggggcgccggcgaagggtggtagacgaggatccggacgagaggcggcggaaatttctggaacggaaccgggcagctgccacccgctgcagacagaagaggaaggtctgggtgatgtcattggaaaagaaagcagaagaactcacccagacaaacatgcagcttcagaatgaagtgtctatgttgaaaaatgaggtggcccagctgaaacagttgttgttaacacataaagactgcccaataacagccatgcagaaagaatcacaaggatatctaagtccagagagtagccctcctgctagtcctgtcccagcttgctcccagcaacaagtcatccagcataataccatcactacttcctcatcggtcagcgaggtggtaggaagctccaccctcagccagctcaccactcacagaacagacctgaatccgattctttaaaatgcaccatcagacctggcctccaagaagagctgtagcgtaccatgcgtcctttcttttaagggcatttttagaattaactcagacctggaagactcctcagttcttcaaagactggctttcatttttatagttattatggaaatgttgtcttttatacttagttatataagaaaaagggagttatgcaattaatatctatcagcttgggaaacgctttggtgcttttctccagttttctggtaccagttacttgtttataaactgaaccttttctgtatatagccatggtttcattcttatcagtccaaccctttgcctgaaacattgaatcttgttaaaccacagcttttagctaaaatgaggtatacctagatgtcaagtaagacagatccaaggtaactgggtaggaaatcttttgacatcttaactcatgttgagtttgtgctgtggtgtcaccagaattccagataaacacacagcctttcccatacctttttttttcttactataaaatattataagatccattgatgtccaaataataccaccgagcatctcttcacctctcctcctcttggtccacttgctaatgcccagttttcttctccatttccactttttcttaggctccctatttactattcattttgacttccttctgttttatttttttccctttagcattgcatgtgaataagaaaataatgtttaaagaaa

SEQ ID NO: 7445 - DNA, 4167 bp, Homo sapiens
  misc_feature (1)..(4167): n=a,t,g or c
cccgcctaatcttcacccgctgctaggctcgtttaatgagtcttctgagagctaaggagtcctcggattcattcaaagcattctacaatgaacgctaggggggaaaaagaacaaacaaaatacatttcaaatataggattcaattacttttcactactcaatgatgtgtcaaaggcacgctgtgttttgttttgagggcggggagatgacaggagggaatcctgggcccccattggctcgccgctcgccgctgcagttgagctccagccgctccgagagcattattgatctgaagggtaaatgtggagggagccacagagaggggtccaggcttttctgagaagagaggcagcctcttccaggaagaaagtggtgtctactggctgcccggcctggagaaccttctttgaatgaaaacggacaaaatgcaaagcagtgcgttggcacagtgatttggaaaggggaaacagaagagaagggtctcaccttccgcgcaaggctgagctgttggcaccctgctgcggccgtcggtgctgctgctcctgcagctgccttttctgccatcagctttgttacctaacagcttggctcttttgggaatatagacaagctggaacccaggagcagttgggagttttaaagaatgccagcctttttaaagctttgatgtccagtgctatagaatcaagttactgtggaggtcaaaacaatttgagatacataagctggccttagaaaataaattgcctctaacttacagtgaggagctcaacataacagggaaaaggagcacaggatgcagctacttggagggtgttgattgaaaacttcgatctccccaccccattcacggttgatttgacggatttctcaccttgttcacagagaaaatttcaattaaggcccctttagatggaatataatacagcagaagccttttcatcaaaaggattaatgcctgcatcatcatttctgcaataaaacaagaagctaagtggtggaggccacagacacctcaaacctggattccacaattctacgttaagtgttggagtttttattactctgctgtaggaaagcctttgccaatgcttacaaggaactgtttatccctgcttctctgggttctgtttgatggaggtctcctaacaccactacaaccacagccacagcagactttagccacagagccaagagaaaatgttatccatctgccaggacaacggtcacatttccaacgtgttaaacgtggctgggtatggaatcaattttttgtgctggaagaatacatgggctccgagcctcagtatgtgggaaagctccattccgacttagacaagggagagggcactgtgaaatacaccctctcaggagatggcgctggcaccgtttttaccattgatgaaaccacaggggacattcatgcaataaggagcctagatagagaagagaaacctttctacactcttcgtgctcaggctgtggacatagaaaccagaaagcccctggagcctgaatcagaattcatcatcaaagtgcaggatattaatgataatgagccaaagtttttggatggaccttatgttgctactgttccagaaatgtctcctgtgggtgcatatgtactccaggtcaaggccacagatgcagatgacccgacctatggaaacagtgccagagtcgtttacagcattcttcagggacaaccttatttctctattgatcccaagacaggtgttattagaacagctttgccaaacatggacagagaagtcaaagaacaatatcaagtactcatccaagccaaggatatgggaggacagcttggaggattagccggaacaacaatagtcaacatcactctcaccgatgtcaatgacaatccacctcgattccccaaaagcatcttccacttgaaagttcctgagtcttcccctattggttcagctattggaagaataagagctgtggatcctgattttggacaaaatgcagaaattgaatacaatattgttccaggagatgggggaaatttgtttgacatcgtcacagatgaggatacacaagagggagtcatcaaattgaaaaagcctttagattttgaaacaaagaaggcatacactttcaaagttgatgcttccaaccttcaccttgaccaccggtttcactcggcgggccctttcaaagacacagctacggtgaagatcagcgtgctggacgtagatgagccaccggttttcagcaagccgctctacaccatggaggtttatgaagacactccggtagggaccatcattggcgctgtcactgctcaagacctggatgtaggcagcagtgctgttaggtacttcatagattggaagagtgatggggacagctactttacaatagatggaaatgaaggaaccatcgccactaatgaattactagacagagaaagcactgcgcagtataatttctccataattgcgagtaaagttagtaaccctttattgaccagcaaagtcaatatactgattaatgtcttagatgtaaatgaatttcctccagaaatatctgtgccatatgagacagccgtgtgtgaaaatgccaagccaggacagataattcagatagtcagtgctgcagaccgagatctttcacctgctgggcaacaattctcctttagattatcacctgaggctgctatcaaaccaaattttacagttcgtgacttcagaaacaacacagcggggattgaaacccgaagaaatggatacagccgcaggcagcaagagttgtatttcctccctgttgtaatagaagacagcagctaccctgtccagagcagcacaaacacaatgactattcgagtctgtagatgtgactctgatggcaccatcctgtcttgtaatgtggaagcaatttttctacctgtaggacttagcactggggcgttgattgcaattctactatgcattgttatactcttagccatagttgtactgtatgtagcactgcgaaggcagaagaaaaaagacaccctgatgacctctaaagaagacatcagagacaacgtcatccattacgatgatgaaggaggtggggaggaagatacccaggctttcgacatcggggctctgagaaacccaaaagtgattgaggagaacaaaattcgcagggatataaaaccagactctctctgtttacctcgtcagagaccacccatggaagataacacagacataagggatttcattcatcaaaggctacaggaaaatgatgtggatccaactgccccaccatacgattcactggccacatatgcctacgaagggagtgggtccgtggcagagtccctcagctctatagactctctcaccacagaaaccgaccaggactatgactatctgacagactggggaccccgctttaaagtcttggcagacatgtttggcgaagaagagagttataaccctgataaagtcacttaagggagtcgtggaggctaaaatacaaccgagaggggagatttttaaaaaagaaaaagaaacacaaatattaatagaaatctctctcacacacacacacacacacaaacacacacacacacacacactctttctgggacaagattcctttgattacctggtttctagtaagttactaaattaatcatattgtcagttttggtttattctgccaacacgagatacatcctataatgtgtacttgctttgttttgttgttttgttttttcacaatcacactgagacaagctcaggcctattcaatacaatttactgacatgacaacctagaacgaagatagctatgtggcatcacggtggaagagtgttagatttttcttaattccactaaagtgcctattgaaactcttatcatttaaagtggtgtacagtacactctgctgtgatggtattgcgggattcagagataaagacataaaacaaagacaccgtctttatgtcaagaagcaatagcgacactctgactctcctcattccttttgagaacaaaagaagaacactttctgatctccaccttcttctaattcaaaaggttttctttttcttttttaaactgtatgctaaaacgtatttgtttatcctatcctttcagaaaattgaaataaatatgaaaatatcaagttcaatatgtaagtccc

SEQ ID NO: 7446 - DNA, 2585 bp, Homomo sapiens
  misc_feature (1)..(2585): n=a,t,g or c
cagtgaaggacatgccagtgagatcaggtggcctgcttccagatcctcctagaagtagttacttggaaagtccaagaggcccaagatttgatggtcctcgaagatttgaggatttagggtcaaggtgtgaaggaccgagacccaaagggcctcgttttgaaggaaatcgccccgatgggccaagacccagatatgaaggtcacccagcagagggcactaaaagcaagtggggaatgattccccgggggtcagcatctcaattttatattacccccagtacatccctaagtcctcgacagagtggaccacagtggaaaggccccaaaccagcttttggacagcagcatcagcagcaacctaagtcacaagcagaacctctttcaggaaacaaagaaccattagcagacaccagtagtaaccagcagaagawttttaaaatgcaatcagctgcattttccattgctgcagatgtaaaggatgtcaaggcggctcagtcaaatgagaatctaagcgactctcaacaagagccacctaaaagtgaagtctcggaagggcccgtagagccctctaattgggaccagaatgttcaaagtatggagactcaaatcgacaaagcccaagctgttactcagcctgtaccccttgcgaataagcctgtacctgctcaatctacttttccttcaaaaacaggggggatggagggaggaacagcagtagcaacatcatcattaacagcagataatgattttaaacctgtgggtattggtctaccccattcagaaaacaaccaagataaaggcctgcctcggccagataatagagataatagattagaaggcaatagaggcaacagctcatcttacagaggtcctgggcaaagcagaatggaagacacacgggataaaggtcttgtaaacagaggtcgcgggtaggcaatcagtcgagggccaggattggtcaagcaagaagacttcgggataagatgatgggtagaagagaagatagtcgagagaagttgaacagaggagaaggtacccgggacagagggttgttgagccctggaaccagtcgggagaaagtgccaggtggtcttcaagggagccaggacaggggtgcagctggcagccgagaaaggggaccacctcggagggctggcagtcaggagaggggacctcttcgaagggctgggagtagagagagaataccaccccgaagagctgggagcagggagagaggaccacctcgagggcctggcagtcgagaaaggggactgggaagatcagattttggtcgtgatagaggtccattcagaccagaaccaggagatggtggggaaaaaatgtatccatatcaccgggatgagcctcctagggctccatggaaccatggagaagagcgagggcatgaagagtttccattagatggtagaaatgctccaatgggaacgagaaagactcgatgactgggatagagagagatactggagagaatgtgaacgtgactatcaagatgatacactagagctctataacagagaggacaggttctcagcaccaccatctcggtctcatgatggagataggcgaggcccttggtgggatgattgggagagagaccaggatatggatgaggactacaatagggaaatggaaagggacatggacagggatgtggatcggatttcaagacctatggatatgtatgatagaagtttggataatgagtgggacagagattatgggagaccactggatgaacaagaatcacagtttcgtgaacgggatattccatctcttccacctttaccgcccctcccacctcttccacctttggatagatatcgggatgatagatggagagaagaaagaaatcgagagcatgggtatgatcgagatytccgtgataggggtgagttgaggattcgagagtatccagaaagaggagatacatggcgggaaaagcgagattatgttcctgacagratggactgggaaagagracggttgtcagacagatggtacccatctgatgtggatagacattcccccatggcggaacatatgccctcctcacatcattcctcagaaatgatggggtccgatgcaagcttagactctgaccaaggccttggaggggtaatggttctcagtcagaggcagcatgaaatcrttttgaaagctgcacaagaactgaaaatgyttcgggaacgagaaagaacagcttccaaagatgaaagacttcgggtctgagccacagatggctgaccatctaccacctcaggaatccaagattgcagaatrcatcttcaagacctggaatgtatccgcctccagggtcgtatagacctcccyctcctatgggcaaaccaccaggttcaattgtaagaccctctgctccaccagcaagatcatctgttcctgtgaccaggccacctgtcccaataccnaccaacctccacctcctccacctctacctcctcctcctccagtgataaagccacaaacttcagctgtagaacaggaacgatgggatgaagattctttctatgggctctgggatacaaatgatgaacaaggactgaattc

SEQ ID NO: 7447 - DNA, 1709 bp, Homo sapiens; identical to SEQ ID NO: 4837
  misc_feature (1)..(1709): n=a,t,g or c

SEQ ID NO: 7448 - DNA, 4320 bp, Homo sapiens
  misc_feature (1)..(4320): n=a,t,g or c
ccggactcgaggtggccgatgtgacagcatgggggtggactttgatgtgaagactttctgccacaacttgcgggcgactaagccaccatacgagtgcccggtggagacctgccgaaaggtctacaagagttacagtggtattgagtaccacctgtaccactatgaccacgacaacccaccacccccacaacaaactccactccgcaagcacaagaaaaaggggcgccagtcacgcccagccaacaagcagtcacccagcccctcagaggtctcacagtcaccaggccgtgaggtgatgagctatgcacaggcccagcgcatggtggaggtggacttgcatggccgcgtccaccgcatcagcatctttgacaacctggatgtggtgtcagaggatgaggaagcccccgaggaggcccctgagaatggcagcaacaaggagaacactgagacaccagctgctactcccaagtcaggcaaacataagaacaaggagaagcgcaaggactccaaccatcaccaccaccacaatgtttctgcgagcaccactcccaagctgccagaggtggtctatcgggagctggaacaggacacccctgatgccccaccccggccaacttcctattaccggtacatcgagaagtctgcagaggagctggacgaggaagtagagtatgacatggacgaggaggactacatctggctggatatcatgaatgagcgtcggaagacagagggtgtaagtcccatcccgcaggagatctttgagtacctaatggaccgactggagaaggagtcgtactttgagagtcataataaaggcgaccctaatgcgctagtggacgaggatgctgtttgctgtatctgcaatgatggtgagtgccagaacagcaatgtcatcctcttctgtgacatgtgcaacctggaagtgcaccaggagtgctacggtgtcccctatatccctgagggccagtggctgtgccgccgttgcctgcagtcaccctctcgtgctgtggattgtgccctgtgccccaacaagggcggtgccttcaagcagacagatgacgggcgctgggcccatgtggtgtgtgccttgtggatccctgaggtctgcttcgccaacacggtcttcctagagcctattgacagcattgagcacatcccaccagctcgctggaagctcacctgctacatttgcaaacaacggggctcaggggcctgcatccagtgccacaaggccaactgttacacagctttccatgtgacatgcgcccagcaggctggcctttacatgaagatggagcctgtgcgggagacaggcgccaacggcacctctttcagtgtccgcaagacagcctactgcgacatccacacgcctccaggttcagcacgccgactgcctgccctgtcccacagcgagggtgaggaggatgaagatgaggaggaggatgagggtaagggctggagctcagagaaagtcaagaaggccaaggccaagtcccggatcaaaatgaagaaggcacggaagatcctggcagagaagcgggcagcagcacctgtggtgtcagtgccctgcatcccaccacacaggcttagtaaaatcaccaaccgcctgaccatccaaaggaagagccagttcatgcagaggctgcacagctactggacactgaagcggcagtcacggaatggggtcccattgctacgtcgcctgcagacacacctgcaatctcagaggaactgtgaccaagttgggagagattctgaggataagaactgggcccttaaagaacagctcaagtcctggcagcggctccggcatgacttggagcgagctcggctgctcgtggaattgatccgcaagcgggaaaaactcaaaagggagacgatcaaggttcagcagattgccatggagatgcagctgactcctttcctcatcctccttcgcaaaaccttggagcagctccaagagaaggacacaggcaacatcttcagcgagccggtccctctgtctgaggtacctgactacctagaccacatcaaaaagcccatggactttttcaccatgaagcagaacttggaggcttaccgctacctgaattttgatgattttgaggaggacttcaacctcatcgtcagcaactgcctcaagtataacgccaaggacaccatcttctaccgggcagcagtgcggcttcgtgagcagggtggtgctgtcgtccgccaggcccggcgccaggcagaaaaaatgggcattgactttgagacgggcatgcatatcccccacagcctggctggagatgaggccacacaccacactgaagatgcagccgaggaagagcggctggtcttgctggagaaccagaagcacctgccagtggaagaacagctaaagctgcttctggagcggctggacgaagtgaatgccagcaagcagagtgtgggccgctcacggcgtgcaaagatgatcaagaaagagatgacggcactgcggcggaagcttgcccatcagcgagagacgggacgtgatggccctgagcggcatggcccctcgagccggggtagtctgacaccccacccggcagcctgtgacaaggatgggcagacagatagtgcggcagaggagagcagcagccaggagacaagcaaaggcctgggtcccaacatgtcctcaacccccgcacatgaggtgggcaggagaacctcagttctgttctccaaaaagaacccgaagacagctggaccgcccaagaggccgggccggccccccaaaaaccgggagagccagatgacccccagccacggaggcagtcctgtggggcccccccagctccccatcatgagttccctgcgtcagcgcaagcggggtaggagcccccggcccagttcgagctcagacagcgacagtgataagtccacagaagaccccccaatggacttaccagccaatggcttcagcggtggaaaccaaccagtgaagaagagtttcttggtataccgtaatgactgcagccttccccggagcagctcagactctgagtccagcagcagtagcagtagcagcgctgcttcagaccggaccagcacaacgccctcaaaacaaggccggggcaaaccctccttctctcggggcactttcccagaggacagcagtgaggatacctcaggcactgagaatgaggcctactccgtgggcactggccgcggcgtgggccacagcatggtaaggaagagtctgggccggggagctggctggctgtcagaggatgaggactccccgctggatgctctggacctcgtgtgggccaaatgccgaggctatccatcatacccagctctgatcattgatccaaagatgccccgagaaggtatgttccaccatggggttcccatccctgtgcccccactggaggtgctgaaacttggggagcagatgacccaggaagcccgagagcatctctacctcgtcctcttctttgacaacaaacgaacctggcagtggctgcccaggaccaagctggttcctctgggtgtgaaccaggacctagacaaggagaagatgctggagggccgcaagtccaacatccgcaagtcagtacagatcgcctaccacagggctctgcagcaccgcagcaaggtgcaaggcgagcagagcagtgagaccagcgatagtgattgatactgctcaacacagcccaacctatagtgccctgtgacttctctcctcccctttgctcactgtcctggagtggcaccggcctctgcactgactcatttctggtcttggggccagtctcaggggaagctgggtgggggaggtccctcctgccctaagtgcagctggactgtacagaacactccaagggccaatggcagttcagcgcaaggagagggagggcccacaggtcagaaaaagctccagagacctcacagcattgtagggcggggtggtgggccaaagttaggacactgcgtaaaacaggccatcccaccacctctacctgctcatgccaggagaatccataactgcctagagcctggggccctaccggtcgtgaggtgagtgggcatctgtccagcctggaagaggggcactaggtgactccctcccctgctgttgtaaatactgtaattatcggagaatttaaattattctcatttgtaactgcgtttccgggtcgcgccagagtcatttggtactaaaaaaaaaaagactgggggctgtccccatttcccttctctttcccatagattcccccacctttcaaactggtttgtatttatttcaaaggaagaaaatatattgattcttagaaaataaaaaaa

SEQ ID NO: 7449 - DNA, 2197 bp, Homo sapiens
  misc_feature (1)..(2197): n=a,t,g or c
tttataagcagtttacaactacttggcatcactagctcagaagctcaaaatgtatatacaaagaaatgattagaatttatcttaactgaaagcactagtttaaacagcctagagtcttgtagaaattgttatccaaaacatgcagaggcagcaagagttgcccaaaaccacattatctatactttatatgcttttctgttaaagattgaagcaatgtgaagtggatggaaatatttgcttaaaagaacaaaatgaattaacacagcatagatgactaataaaaaccttgggtttatgccatacacttcaaactcaaggcaaagtccagtagtggctcatgttctgggtttttagaaagcaaatgaaaatatttggaaagatcaatatatttcaacagaagagccataaatgccctgaaagcagaaagttgacacaattttaaatagaattcagttgaattaaacaggaccttgcctcaagaaataatctaccaacaattaacttgttttaaagcaaagttaggaagtgagcatgttcaaattattaaataaaaaagtaagctgtgtatttcattcatagaaatagaggctggcctacttcggatgattctcagcatgtgattacagatgtgggcttatacatcctagggagttaaggcgtactctggcttggatagagtagagctctttgaaactcttctctcacccagctagtttatatagactagagaactagaatgtagcagcatactctgtcttagaagcccttttatatggagctggtctggaaggtttgaaaacataacaaatgtgttggtgtctcccaatgtattgctagattcttacccaagagcattatcctggttagggtttggtttggttttgttttgtttttaatgatgaaccacaaactaacactagatgttagttctttcatcaagtgaggagagtagaagaaaagtccagaactctgaaacaccttttcaaaagtttttcaagccatgatgtttcgaagttaaatgctctgttatgtaagcaatataatcagtttttattaatgtaacattccttagtgttttggggtatcacacaaaaaagaatatccatatctggaagcaacagcttttaaataagagcattgtggtggtggtggtgatagtggtttttttttttttttttgagttggagtctcgcacagttgcccaggttggagtgcagtggcacgatctcagctcgcttcaacctctgctcccaggttcaagcaattcttctgcctcagcctcctgagtagctgggattataggcacctgctaccatgcctggctgatttttattattttagtagagacaggtttcaccatgttggccaggctggtcttgaactcttaacctcaggtgaatcacccacctcggcctcccaaagtgctggaattacaggcatgaaccaccatggccagccaaataagagcatttttaatgtaaaattatgcatgaaatgtacattcaattttgtctttgtttactaggatccatgttctcacaagctatgaagaaatggtgcaaggaaatactgatgaggccgatctgtcactgttgtttccaggagagaatgggagacaatcctagacttccaccataatgcagttacctgtaggcataattgatgcacatgatgttcacacagtgagagtcttaaagatacaaaatggtattgtttacattactagaaaattattagttttccaatggcaataacccatttatgagagtgttttagcctactggaatagacagggaccacatcctctgggaagcagataaggacatagaactgatacttgatgcacactcgtagtggtaactcatccctaatcagcattgtaaagcaggtgccagaggtggtttgctttgtccttccaaagcaggtgagtcagccccaccgagagccaggcagctttgagtggcagcgtggtgctagcagcttcagcggaacagggtgagagttaattatgcagtcttcttgacagcggcattaatttggaaggaaactgacaagtcatgggtcaagtttcagtgacttcctccttcctctgatggcagtatatagttttcacattttaattcctcctcctgagatgcactatacttaaaaccattctctcccctgctaacagaagggtgtgaatctggtttacttt

SEQ ID NO: 7450 - DNA, 2333 bp, Homo sapiens
  misc_feature (1)..(2333): n=a,t,g or c
acaactgtctgctgcgcccgaaaaacaagtcggtgcgctggggacccggggccggggccgccttactccggcctagccccgcggccctcggtgcgggctccagggcatgctcggtaccccccgcggctccagcccagacgccccggcctcaggtctcggcccccgcttggggccccggccgtgcggcgcgagggagcggccggatggagcggaggatgaaagccggatacttggaccagcaagtgccctacaccttcagcagcaaatcgcccggaaatgggagcttgcgcgaagcgctgatcggcccgctggggaagctcatggacccgggctccctgccgcccctcgactctgaagatctcttccaggatctaagtcacttccaggagacgtggctcgctgaagctcaggtaccagacagtgatgagcagtttgttcctgatttccattcagaaaacctagctttccacagccccaccaccaggatcaagaaggagccccagagtccccgcacagacccggccctgtcctgcagcaggaagccgccactcccctaccaccatggcgagcagtgcctttactccagtgcctatgacccccccagacaaatcgccatcaagtcccctgcccctggtgcccttggacagtcgcccctacagccctttccccgggcagagcaacggaatttcctgagatcctctggcacctcccagccccaccctggccatgggtacctcggggaacatagctccgtcttccagcagcccctggacatttgccactccttcacatctcagggagggggccgggaacccctcccagccccctaccaacaccagctgtcggagccctgcccaccctatccccagcagagctttaagcaagaataccatgatcccctgtatgaacaggcgggccagccagccgtggaccagggtggggtcaatgggcacaggtacccaggggcgggggtggtgatcaaacaggaacagacggacttcgcctacgactcagatgtcaccgggtgcgcatcaatgtacctccacacagagggcttctctgggccctctccaggtgacggggccatgggctatggctatgagaaacctctgcgaccattcccagatgatgtctgcgttgtccctgagaaatttgaaggagacatcaagcaggaaggggtcggtgcatttcgagaggggccgccctaccagcgccggggtgccctgcagctgtggcaatttctggtggccttgctggatgacccaacaaatgcccatttcattgcctggacgggccggggaatggagttcaagctcattgagcctgaggaggtcgccaggctctggggcatccagaagaaccggccagccatgaattacgacaagctgagccgctcgctccgatactattatgagaaaggcatcatgcagaaggtggctggtgagcgttacgtgtacaagtttgtgtgtgagcccgaggccctcttctctttggccttcccggacaatcagcgtccagctctcaaggctgagtttgaccggcctgtcagtgaggaggacacagtccctttgtcccacttggatgagagccccgcctacctcccagagctggctggccccgcccagccatttggccccaagggtggctactcttactagcccccagcggctgttccccctgccgcaggtgggtgctgccctgtgtacatataaatgaatctggtgttggggaaaccttcatctgaaacccacagatgtctctggggcagatccccactgtcctaccagttgccctagcccagactctgagctgctcaccggagtcattgggaaggaaaagtggagaaatggcaagtctagagtctcagaaactcccctgggggtttcacctgggccctggaggaattcagctcagcttcttcctaggtccaagccccccacaccttttccccaaccacagagaacaagagtttgttctgttctgggggacagagaaggcgcttcccaacttcatactggcaggagggtgaggaggttcactgagctccccagatctcccactgcggggagacagaagcctggactctgccccacgctgtggccctggagggtcccggtttgtcagttcttggtgctctgtgttcccagaggcaggcggaggttgaagaaaggaacctgggatgaggggtgctgggtataagcagagagggatgggttcctgctccaagggaccctttgcctttcttctgccctttcctaggcccaggcctgggtttgtacttccacctccaccacatctgccagaccttaataaaggcccccacttctcccatt

SEQ ID NO: 7451 - DNA, 18648 bp, Homo sapiens; identical to SEQ ID NO: 4177
  misc_feature (1)..(18648): n=a,t,g or c

SEQ ID NO: 7452 - DNA, 1547 bp, Homo sapiens
  misc_feature (1)..(1547): n=a,t,g or c
cctcctaaccagcggccagtgggtttcccataccccaggatgtgagcctctttaacctgtaatgctgtggctagcccttggcccctttcctgccatggagaaccaggtgctggtaattcgcatcaagatcccaaatagtggcgcggtggactggacagtgcactccgggccgcagttactcttcagggatgtgctggatgtgataggccaggttctgcctgaagcaacaactacagcatttgaatatgaagatgaagatggtgatcgaattacagtgagaagtgatgaggaaatgaaggcaatgctgtcatattattattccacagtaatggaacagcaagtaaatggacagttaatagagcctctgcagatatttccaagagcctgcaagcctcctggggaacggaacatacatggcctgaaggtgaatactcgggccggaccctctcaacacagcagcccagcagtctcagattcacttccaagcaatagcttaaagaagtcttctgctgaactgaaaaaaatactagccaatggccagatgaatgaacaagacatacgatatcgggacactcttggtcatggcaacggaggcacagtctacaaagcatatcatgtcccgagtgggaaaatattagctgtaaaggtcatactactagatattacactggaacttcagaagcaaattatgtctgaattggaaattctttataagtgcgattcatcatatatcattggattttatggagcattttttgtagaaaacaggatttcaatatgtacagaattcatggatgggggatctttggatgtatataggaaaatgccagaacatgtccttggaagaattgcagtagcagttgttaaaggccttacttatttgtggagtttaaagattttacatagagacgtgaagccctccaatatgctagtaaacacaagaggacaggttaagctgtgtgattttggagttagcactcagctggtgaattctatagccaagacgtatgttggaacaaatgcttatatggcgcctgaaaggatttcaggggagcagtatggaattcattctgatgtctggagcttaggaatctcttttatggagcttgctcttgggaggtttccatatcctcagattcagaaaaaccagggatctttaatgcctctccagcttctgcagtgcattgttgatgaggattcgcccgtccttccagttggagagttctcggagccatttgtacatttcatcactcagtgtatgcgaaaacagccaaaagaaaggccagcacctgaagaattgatgggccacccgttcatcgtgcagttcaatgatggaaatgccgccgtggtgtccatgtgggtgtgccgggcgctggaggagaggcggagccagcaggggcccccgtgaggctgccgcagggcactgaaagcccaggaccagtaaccaaggagaacaacccacccgtcgcccttctccgtatgctgcctgcgccagaagagctttgctgggccctggcttccctgccctcgccttcaccctctgtcag

SEQ ID NO: 7453 - DNA, 2653 bp, Homo sapiens; identical to SEQ ID NO: 3740
  misc_feature (1)..(2653): n=a,t,g or c

SEQ ID NO: 7454 - DNA, 3743 bp, Homo sapiens
  misc_feature (1)..(3743): n=a,t,g or c
ttgcgggaaagagccaaaccctggcgttggggggcccgggcggggagcccctcccgcggtccacagcgacgcctgcccagccctcctccccttccggctccggcacggggccccgaggcgttcggaggccaggcgggtttctgtcaggcccggggaggaggggcgggcggggcggccgctgcctccccgggacgggccgtaccacgcggacggggaggacggggccaggggactgcagggcggctgcaccgcccgggggcggggtgcggacgggccggcgggctccccggggcggggcgggagggcggggcgtggggcggacggaaccaccggggcggggtgggaggtaacgggacgggcgcgaccatggcgcggtgagggagcgggggtggggatcggtccgggggaggcctgaggccgctggcttgtgcgctgtctccgccgcccccctctttcgccgccgccgccgccgccccgggcatgtcgtccaactgcaccagcaccacggcggtggcggtggcgccgctcagcgccagcaagaccaagaccaagaagaagcatttcgtgtgccagaaagtgaagctattccgggccagcgagccgatcctcagcgtcctgatgtggggggtgaaccacacgatcaatgagctgagcaatgttcctgttcctgtcatgctaatgccagatgacttcaaagcctacagcaagatcaaggtggacaatcatctcttcaataaggagaacctgcccagccgctttaagtttaaggagtattgccccatggtgttccgaaaccttcgggagaggtttggaattgatgatcaggattaccagaattcagtgacgcgcagcgcccccatcaacagtgacagccagggtcggtgtggcacgcgtttcctcaccacctacgaccggcgctttgtcatcaagactgtgtccagcgaggacgtggcggagatgcacaacatcttaaagaaataccaccagtttatagtggagtgtcatggcaacacgcttttgccacagttcctgggcatgtaccgcctgaccgtggatggtgtggaaacctacatggtggttaccaggaacgtgttcagccatcggctcactgtgcatcgcaagtatgacctcaagggttctacggttgccagagaagcgagcgacaaggagaaggccaaggacttgccaacattcaaagacaatgacttcctcaatgaagggcagaagctgcatgtgggagaggagagtaaaaagaacttcctggagaaactgaagcgggacgttgagttcttggcacagctgaagatcatggactacagcctgctggtgggcatccacgacgtggaccgggcagagcaggaggagatggaggtggaggagcgggcagaggacgaggagtgtgagaatgatggggtgggtggcaacctactctgctcctatggcacacctccggacagccctggcaacctcctcagctttcctcggttctttggtcctggggaattcgacccctctgttgacgtctatgccatgaaaagccatgaaagttcccccaagaaggaggtgtatttcatggccatcattgatatcctcacgccatacgatacaaagaagaaagctgcacatgctgccaaaacggtgaaacacggggcaggggccgagatctcgactgtgaaccctgagcagtactccaaacgcttcaacgagtttatgtccaacatcctgacgtagttctcttctaccttcagccgagaccgagagactggatatggggtcggggatcgggacttagggagaagggtgtatttgggctagatgggagggtgggagcgagatcgggtttgggagggctttagcaatgagacttgcagcctgtgacaccgaaagagactttagctgaagaggagggggatgtgctgtgtgtgcaccagctcacaggatgtaaccccaccttctgcttacccttgattttttctccccatttgacacccaggttaaaaaggggttccctttttggtaccttgtaaccttttaagataccttggggctagagatgacttcgtgggtttatttgggttttgtttctgaaatttcattgctccaggtttgctatttataatcatatttcatcagcctacccaccctccccatctttgctgctctcagttcccttcaattaaagagatacccagtagacccagcacaagggtccttccagaaccaagtgctatggatgccagattggagaggtcagacacctcgccctgctgcatttgctcttgtctggattaactttgtaatttatggagtattgtgcacaacttcctccacctttcccttggattcaagtgaaaactgttgcattattcctccatcctgtctggaatacaccaggtcaacaccagagatctcagatcagaatcagagatctcagaggggaataagttcatcctcatgggatggtgaggggcaggaaagcggctgggctcttggacaccctggttctcagagaaccctgtgatgatcacccaagccccaggctgtcttagcccctggagttcagaagtcctctctgtaaatcctgcctcccactaggtcaagaggaactagagtacctttggatttatcaggaccctcatgtttaaatggttatttccctttgggaaaacttcagaaactgatgtatcaaatgaggccctgtgccctcgatctatttccttcttccttctgacctcctcccaggcactcttacttctagccgaactcttagctctgggcagatctccaagcgcctggagtgctttttagcagagacacctcgttaagctccgggatgaccttgtaggagatctgtctcccctgtgcctggagagttacagccagaaaggtgcccccatcttagagtgtggtgtccaaacgtgaggtggcttcctagttacatgaggatgtgatccaggaaatccagtttggaggcttgatgtgggttttgacctggcctcaccttggggctgtttttccttgttgccccgctctagacttttagcagatctgcacccacaggcttttttggaaggagtggcttcctcgaggtgttccacctgcttcggagcctgccacccaggccctcagaactgaccacaggctgctctggccaggagagaaacagctctgttgttctgcattgggggaggtacattcctgcatcttctcaccccctcaaccaggaactggggatttgggatgagatatggtcagacttgtagataaccccaaagatgtgaagatcgcttgtgaaaccattttgaatgaatagattggtttcctgtggctccctccaaacctggccaagcccagcttccgaagcaggaaccagcactgtctctgtgcctgactcacagcatataggtcaggaaagaatggagacggcattcttggacttcactggggctgctggattggatgggaaaccttctggaagaggcagatgggggtcaaaccactgccttgccccaggaaggggccataggtaggtctgaacaactgccggaagaccactacatgacttagggaacttgaaaccaactggctcatggagaaaacaaatttgacttgggaaagggattatgtaggaataatgtttggacttgatttccccacgtcataatgaagaatggaagtttggatctgctcctcgtcaggcgcagcatctctgaagcttggaaagctgtcttccagggttgtaa

SEQ ID NO: 7455 - DNA, 1050 bp, Homo sapiens; identical to SEQ ID NO: 3111
  misc_feature (1)..(1050): n=a,t,g or c

SEQ ID NO: 7456 - DNA, 2627 bp, Homo sapiens; identical to SEQ ID NO: 3112
  misc_feature (1)..(2627): n=a,t,g or c

SEQ ID NO: 7457 - DNA, 1649 bp, Homo sapiens
  misc_feature (1)..(1649): n=a,t,g or c
cggcagccagcctattctttggccgggtcggtgcgagtggtcggctgggcagagtgcacgctgcttggcgccgcaggtgatcccgccgtccactcccgggagcagtgatgttgggcaactctgcgccggggcctgcgacccgcgaggcgggctcggcgctgctagcattgcagcagacggcgctccaagaggaccaggagaatatcaacccggaaaaggcagcgcccgtccaacaaccgcggacccgggccgcgctggcggtactgaagtccgggaacccgcggggtctagcgcagcagcagaggccgaagacgagacgggttgcaccccttaaggatcttcctgtaaatgatgagcatgtcaccgttcctccttggaaagcaaacagtaaacagcctgcgttcaccattcatgtggatgaagcagaaaaagaagctcagaagaagccagctgaatctcaaaaaatagagcgtgaagatgccctggcttttaattcagccattagtttacctggacccagaaaaccattggtccctcttgattatccaatggatggtagttttgagtcaccacatactatggacatgtcaattgtattagaagatgaaaagccagtgagtgttaatgaagtaccagactaccatgaggatattcacacataccttagggaaatggaggttaaatgtaaacctaaagtgggttacatgaagaaacagccagacatcactaacagtatgagagctatcctcgtggactggttagttgaagtaggagaagaatataaactacagaatgagaccctgcatttggctgtgaactacattgataggttcctgtcttccatgtcagtgctgagaggaaaacttcagcttgtgggcactgctgctatgctgttagcctcaaagtttgaagaaatataccccccagaagtagcagagtttgtgtacattacagatgatacctacaccaagaaacaagttctgagaatggagcatctagttttgaaagtccttacttttgacttagctgctccaacagtaaatcagtttcttacccaatactttctgcatcagcagcctgcaaactgcaaagttgaaagtttagcaatgtttttgggagaattaagtttgatagatgctgacccatacctcaagtatttgccatcagttattgctggagctgcctttcatttagcactctacacagtcacgggacaaagctggcctgaatcattaatacgaaagactggatataccctggaaagtcttaagccttgtctcatggaccttcaccagacctacctcaaagcaccacagcatgcacaacagtcaataagagaaaagtacaaaaattcaaagtatcatggtgtttctctcctcaacccaccagagacactaaatctgtaacaatgaaagactgcctttgttttctaagatgtaaatcactcaaagtatatggtgtacagtttttaacttaggtttttaattttacaatcatttctgaatacagaagttgtggccaagtacaaattatggtatctattactttttaaatggttttaatttgtatatcttttgtatatgtatctgtcttagatatttggctaattttaagtggttttgttaaagtattaatgatgccagctgccg

SEQ ID NO: 7458 - DNA, 1133 bp, Homo sapiens
  misc_feature (1)..(1133): n=a,t,g or c
agtgtaatgttgggtgggagtgcgggacgcctcaaaatgtcttccagtggcaccctcagcaactactacgtggactcgcttataggccatgagggcgacgaggtgttcgcggcgcgcttcgggccgccggggccaggcgcgcagggccggcctgcaggtgtggctgatggcccggccgccaccgccgccgagttcgcctcgtgtagttttgcccccagatcggccgtgttctctgcctcgtggtccgcggtgccctcccagcccccggcagcggcggcgatgagcggcctctaccacccgtacgttcccccgccgcccctggccgcctctgcctccgagcccggccgctacgtgcgctcctggatggagccgctgcccggcttcccgggcggtgcgggcggtggcggtggtggtggaggcggcggtccgggccgcggtcccagccctggccccagcggcccagccaacgggcgccactacgggattaagcctgaaacccgagcggccccggcccccgccacggccgcctccaccacctcctcctcctccacttccttatcctcctcctccaaacggactgagtgctccgtggcccgggagtcccaggggagcagcggccccgagttctcgtgcaactcgttcctgcaggagaaggcggcaggcggcgacggggggaacgggcctggggcagggatcggggccgcgactgggacgggcggctcgtcggagccctcagcttgcagcgaccacccgatcccaggctgttcgctgaaggaggaggagaagcagcattcgcagccgcagcagcagcaacttgacccaaacaaccccgaagcgaactggatccacgctcgctccacccggaaaaagcgctgtccctacaccaaataccagacgcttgagctggagaaagaattcctcttcaacatgtacctcacccgggaccggcgctacgaggtggccaggattctcaacctaacagagagacaggtcaaaatctggtttcagaaccgtaggatgaaaatgaaaaagatgagcaaggagaaatgccccaaaggagactgacccggcgcggtgctggcgggagcgctcaagggcagcggatttgttgttgttgctgtttcctttgtggg

SEQ ID NO: 7459 - DNA, 12515 bp, Homo sapiens
  misc_feature (1)..(12515): n=a,t,g or c
ctaccgggcggaggtgagcgcggcgccggctcctcctgcggcggactttgggtgcgacttgacgagcggtggttcgacaagtggccttgcgggccggatcgtcccagtggaagagttgtaaatttgcttctggccttcccctacggattatacctggccttcccctacggattatactcaacttactgtttagaaaatgtggcccacgagacgcctggttactatcaaaaggagcggggtcgacggtccccactttcccctgagcctcagcacctgcttgtttggaaggggtattgaatgtgacatccgtatccagcttcctgttgtgtcaaaacaacattgcaaaattgaaatccatgagcaggaggcaatattacataatttcagttccacaaatccaacacaagtaaatgggtctgttattgatgagcctgtacggctaaaacatggagatgtaataactattattgatcgttccttcaggtatgaaaatgaaagtcttcagaatggaaggaagtcaactgaatttccaagaaaaatacgtgaacaggagccagcacgtcgtgtctcaagatctagcttctcttctgaccctgatgagaaagctcaagattccaaggcctattcaaaaatcactgaaggaaaagtttcaggaaatcctcaggtacatatcaagaatgtcaaagaagacagtaccgcagatgactcaaaagacagtgttgctcagggaacaactaatgttcattcctcagaacatgctggacgtaatggcagaaatgcagctgatcccatttctggggattttaaagaaatttccagcgttaaattagtgagccgttatggagaattgaagtctgttcccactacacaatgtcttgacaatagcaaaaaaaatgaatctcccttttggaagctttatgagtcagtgaagaaagagttggatgtaaaatcacaaaaagaaaatgtcctacagtattgtagaaaatctggattacaaactgattacgcaacagagaaagaaagtgctgatggtttacagggggagacccaactgttggtctcgcgtaagtcaagaccaaaatctggtgggagcggccacgctgtggcagagcctgcttcacctgaacaagagcttgaccagaacaaggggaagggaagagacgtggagtctgttcagactcccagcaaggctgtgggcgccagctttcctctctatgagccggctaaaatgaagacccctgtacaatattcacagcaacaaaattctccacaaaaacataagaacaaagacctgtatactactggtagaagagaatctgtgaatctgggtaaaagtgaaggcttcaaggctggtgataaaactcttactcccaggaagctttcaactagaaatcgaacaccagctaaagttgaagatgcagctgactctgccactaagccagaaaatctctcttccaaaaccagaggaagtattcctacagatgtggaagttctgcctacggaaactgaaattcacaatgagccatttttaactctgtggctcactcaagttgagaggaagatccaaaaggattccctcagcaagcctgagaaattgggcactacagctggacagatgtgctctgggttacctggtcttagttcagttgatatcaacaactttggtgattccattaatgagagtgagggaatacctttgaaaagaaggcgtgtgtcctttggtgggcacctaagacctgaactatttgatgaaaacttgcctcctaatacgcctctcaaaaggggagaagccccaaccaaaagaaagtctctggtaatgcacactccacctgtcctgaagaaaatcatcaaggaacagcctcaaccatcaggaaaacaagagtcaggttcagaaatccatgtggaagtgaaggcacaaagcttggttataagccctccagctcctagtcctaggaaaactccagttgccagtgatcaacgccgtaggtcctgcaaaacagcccctgcttccagcagcaaatctcagacagaggttcctaagagaggaggagaaagagtggcaacctgccttcaaaagagagtgtctatcagccgaagtcaacatgatattttacagatgatatgttccaaaagaagaagtggtgcttcggaagcaaatctgattgttgcaaaatcatgggcagatgtagtaaaacttggtgcaaaacaaacacaaactaaagtcataaaacatggtcctcaaaggtcaatgaacaaaaggcaaagaagacctgctactccaaagaagcctgtgggcgaagttcacagtcaatttagtacaggccacgcaaactctccttgtaccataataatagggaaagctcatactgaaaaagtacatgtgcctgctcgaccctacagagtgctcaacaacttcatttccaaccaaaaaatggactttaaggaagatctttcaggaatagctgaaatgttcaagaccccagtgaaggagcaaccgcagttgacaagcacatgtcacatcgctatttcaaattcagagaatttgcttggaaaacagtttcaaggaactgattcaggagaagaacctctgctccccacctcagagagttttggaggaaatgtgttcttcagtgcacagaatgcagcaaaacagccatctgataaatgctctgcaagccctcccttaagacggcagtgtattagagaaaatggaaacgtagcaaaaacgcccaggaacacctacaaaatgacttctctggagacaaaaacttcagatactgagacagagccttcaaaaacagtatccactgtaaacaggtcaggaaggtctacagagttcaggaatatacagaagctacctgtggaaagtaagagtgaagaaacaaatacagaaattgttgagtgcatcctaaaaagaggtcagaaggcaacactactacaacaaaggagagaaggagagatgaaggaaatagaaagaccttttgagacatataaggaaaatattgaattaaaagaaaacgatgaaaagatgaaagcaatgaagagatcaagaacttgggggcagaaatgtgcaccaatgtctgacctgacagacctcaagagcttgcctgatacagaactcatgaaagacacggcacgtggccagaatctcctccaaacccaagatcatgccaaggcaccaaagagtgagaaaggcaaaatcactaaaatgccctgccagtcattacaaccagaaccaataaacaccccaacacacacaaaacaacagttgaaggcatccctggggaaagtaggtgtgaaagaagagctcctagcagtcggcaagttcacacggacgtcaggggagaccacgcacacgcacagagagccagcaggagatggcaagagcatcagaacgtttaaggagtctccaaagcagatcctggacccagcagcccgtgtaactggaatgaagaagtggccaagaacgcctaaggaagaggcccagtcactagaagacctggctggcttcaaagagctcttccagacaccaggtccctctgaggaatcaatgactgatgagaaaactaccaaaatagcctgcaaatctccaccaccagaatcagtggacactccaacaagcacaaagcaatggcctaagagaagtctcaggaaagcagatgtagaggaagaattcttagcactcaggaaactaacaccatcagcagggaaagccatgcttacgcccaaaccagcaggaggtgatgagaaagacattaaagcatttatgggaactccagtgcagaaactggacctggcaggaactttacctggcagcaaaagacagctacagactcctaaggaaaaggcccaggctctagaagacctggctggctttaaagagctcttccagactcctggtcacaccgaggaattagtggctgctggtaaaaccactaaaataccctgcgactctccacagtcagacccagtggacaccccaacaagcacaaagcaacgacccaagagaagtatcaggaaagcagatgtagagggagaactcttagcgtgcaggaatctaatgccatcagcaggcaaagccatgcacacgcctaaaccatcagtaggtgaagagaaagacatcatcatatttgtgggaactccagtgcagaaactggacctgacagagaacttaaccggcagcaagagacggccacaaactcctaaggaagaggcccaggctctggaagacctgactggctttaaagagctcttccagacccctggtcatactgaagaagcagtggctgctggcaaaactactaaaatgccctgcgaatcttctccaccagaatcagcagacaccccaacaagcacaagaaggcagcccaagacacctttggagaaaagggacgtacagaaggagctctcagccctgaagaagctcacacagacatcaggggaaaccacacacacagataaagtaccaggaggtgaggataaaagcatcaacgcgtttagggaaactgcaaaacagaaactggacccagcagcaagtgtaactggtagcaagaggcacccaaaaactaaggaaaaggcccaacccctagaagacctggctggctggaaagagctcttccagacaccagtatgcactgacaagcccacgactcacgagaaaactaccaaaatagcctgcagatcacaaccagacccagtggacacaccaacaagctccaagccacagtccaagagaagtctcaggaaagtggacgtagaagaagaattcttcgcactcaggaaacgaacaccatcagcaggcaaagccatgcacacacccaaaccagcagtaagtggtgagaaaaacatctacgcatttatgggaactccagtgcagaaactggacctgacagagaacttaactggcagcaagagacggctacaaactcctaaggaaaaggcccaggctctagaagacctggctggctttaaagagctcttccagacacgaggtcacactgaggaatcaatgactaacgataaaactgccaaagtagcctgcaaatcttcacaaccagacctagacaaaaacccagcaagctccaagcgacggctcaagacatccctggggaaagtgggcgtgaaagaagagctcctagcagttggcaagctcacacagacatcaggagagactacacacacacacacagagccaacaggagatggtaagagcatgaaagcatttatggagtctccaaagcagatcttagactcagcagcaagtctaactggcagcaagaggcagctgagaactcctaagggaaagtctgaagtccctgaagacctggccggcttcatcgagctcttccagacaccaagtcacactaaggaatcaatgactaatgaaaaaactaccaaagtatcctacagagcttcacagccagacctagtggacaccccaacaagctccaagccacagcccaagagaagtctcaggaaagcagacactgaagaagaatttttagcatttaggaaacaaacgccatcagcaggcaaagccatgcacacacccaaaccagcagtaggtgaagagaaagacatcaacacgtttttgggaactccagtgcagaaactggaccagccaggaaatttacctggcagcaatagacggctacaaactcgtaaggaaaaggcccaggctctagaagaactgactggcttcagagagcttttccagacaccatgcactgataaccccacagctgatgagaaaactaccaaaaaaatactctgcaaatctccgcaatcagacccagcggacaccccaacaaacacaaagcaacggcccaagagaagcctcaagaaagcagacgtagaggaagaatttttagcattcaggaaactaacaccatcagcaggcaaagccatgcacacgcctaaagcagcagtaggtgaagagaaagacatcaacacatttgtggggactccagtggagaaactggacctgctaggaaatttacctggcagcaagagacggccacaaactcctaaagaaaaggccaaggctctagaagatctggctggcttcaaagagctcttccagacaccaggtcacactgaggaatcaatgaccgatgacaaaatcacagaagtatcctgcaaatctccacaaccagacccagtcaaaaccccaacaagctccaagcaacgactcaagatatccttggggaaagtaggtgtgaaagaagaggtcctaccagtcggcaagctcacacagacgtcagggaagaccacacagacacacagagagacagcaggagatggaaagagcatcaaagcgtttaaggaatctgcaaagcagatgctggacccagcaaactatggaactgggatggagaggtggccaagaacacctaaggaagaggcccaatcactagaagacctggccggcttcaaagagctcttccagacaccagaccacactgaggaatcaacaactgatgacaaaactaccaaaatagcctgcaaatctccaccaccagaatcaatggacactccaacaagcacaaggaggcggcccaaaacacctttggggaaaagggatatagtggaagagctctcagccctgaagcagctcacacagaccacacacacagacaaagtaccaggagatgaggataaaggcatcaacgtgttcagggaaactgcaaaacagaaactggacccagcagcaagtgtaactggtagcaagaggcagccaagaactcctaagggaaaagcccaacccctagaagacttggctggcttgaaagagctcttccagacaccagtatgcactgacaagcccacgactcacgagaaaactaccaaaatagcctgcagatctccacaaccagacccagtgggtaccccaacaatcttcaagccacagtccaagagaagtctcaggaaagcagacgtagaggaagaatccttagcactcaggaaacgaacaccatcagtagggaaagctatggacacacccaaaccagcaggaggtgatgagaaagacatgaaagcatttatgggaactccagtgcagaaattggacctgccaggaaatttacctggcagcaaaagatggccacaaactcctaaggaaaaggcccaggctctagaagacctggctggcttcaaagagctcttccagacaccaggcactgacaagcccacgactgatgagaaaactaccaaaatagcctgcaaatctccacaaccagacccagtggacaccccagcaagcacaaagcaacggcccaagagaaacctcaggaaagcagacgtagaggaagaatttttagcactcaggaaacgaacaccatcagcaggcaaagccatggacaccccaaaaccagcagtaagtgatgagaaaaatatcaacacatttgtggaaactccagtgcagaaactggacctgctaggaaatttacctggcagcaagagacagccacagactcctaaggaaaaggctgaggctctagaggacctggttggcttcaaagaactcttccagacaccaggtcacactgaggaatcaatgactgatgacaaaatcacagaagtatcctgtaaatctccacagccagagtcattcaaaacctcaagaagctccaagcaaaggctcaagatacccctggtgaaagtggacatgaaagaagagcccctagcagtcagcaagctcacacggacatcaggggagactacgcaaacacacacagagccaacaggagatagtaagagcatcaaagcgtttaaggagtctccaaagcagatcctggacccagcagcaagtgtaactggtagcaggaggcagctgagaactcgtaaggaaaaggcccgtgctctagaagacctggttgacttcaaagagctcttctcagcaccaggtcacactgaagagtcaatgactattgacaaaaacacaaaaattccctgcaaatctcccccaccagaactaacagacactgccacgagcacaaagagatgccccaagacacgtcccaggaaagaagtaaaagaggagctctcagcagttgagaggctcacgcaaacatcagggcaaagcacacacacacacaaagaaccagcaagcggtgatgagggcatcaaagtattgaagcaacgtgcaaagaagaaaccaaacccagtagaagaggaacccagcaggagaaggccaagagcacctaaggaaaaggcccaacccctggaagacctggccggcttcacagagctctctgaaacatcaggtcacactcaggaatcactgactgctggcaaagccactaaaataccctgcgaatctcccccactagaagtggtagacaccacagcaagcacaaagaggcatctcaggacacgtgtgcagaaggtacaagtaaaagaagagccttcagcagtcaagttcacacaaacatcaggggaaaccacggatgcagacaaagaaccagcaggtgaagataaaggcatcaaagcattgaaggaatctgcaaaacagacaccggctccagcagcaagtgtaactggcagcaggagacggccaagagcacccagggaaagtgcccaagccatagaagacctagctggcttcaaagacccagcagcaggtcacactgaagaatcaatgactgatgacaaaaccactaaaataccctgcaaatcatcaccagaactagaagacaccgcaacaagctcaaagagacggcccaggacacgtgcccagaaagtagaagtgaaggaggagctgttagcagttggcaagctcacacaaacctcaggggagaccacgcacaccgacaaagagccggtaggtgagggcaaaggcacgaaagcatttaagcaacctgcaaagcggaacgtggacgcagaagatgtaattggcagcaggagacagccaagagcacctaaggaaaaggcccaacccctggaagacctggccagcttccaagagctctctcaaacaccaggccacactgaggaactggcaaatggtgctgctgatagctttacaagcgctccaaagcaaacacctgacagtggaaaacctctaaaaatatccagaagagttcttcgggcccctaaagtagaacccgtgggagacgtggtaagcaccagagaccctgtaaaatcacaaagcaaaagcaacacttccctgcccccactgcccttcaagaggggaggtggcaaagatggaagcgtcacgggaaccaagaggctgcgctgcatgccagcaccagaggaaattgtggaggagctgccagccagcaagaagcagagggttgctcccagggcaagaggcaaatcatccgaacccgtggtcatcatgaagagaagtttgaggacttctgcaaaaagaattgaacctgcggaagagctgaacagcaacgacatgaaaaccaacaaagaggaacacaaattacaagactcggtccctgaaaataagggaatatccctgcgctccagacgccaagataagactgaggcagaacagcaaataactgaggtctttgtattagcagaaagaatagaaataaacagaaatgaaaagaagcccatgaagacctccccagagatggacattcagaatccagatgatggagcccggaaacccatacctagagacaaagtcactgagaacaaaaggtgcttgaggtctgctagacagaatgagagctcccagcctaaggtggcagaggagagcggagggcagaagagtgcgaaggttctcatgcagaatcagaaagggaaaggagaagcaggaaattcagactccatgtgcctgagatcaagaaagacaaaaagccagcctgcagcaagcactttggagagcaaatctgtgcagagagtaacgcggagtgtcaagaggtgtgcagaaaatccaaagaaggctgaggacaatgtgtgtgtcaagaaaataacaaccagaagtcatagggacagtgaagatatttgacagaaaaatcgaactgggaaaaatataataaagttagttttgtgataagttctagtgcagtttttgtcataaattacaagtgaattctgtaagtaaggctgtcagtctgcttaagggaagaaaactttggatttgctgggtctgaatcggcttcataaactccactgggagcactgctgggctcctggactgagaatagttgaacaccgggggctttgtgaaggagtctgggccaaggtttgccctcagctttgcagaatgaagccttgaggtctgtcaccacccacagccaccctacagcagccttaactgtgacacttgccacactgtgtcgtcgtttgtttgcctatgttctccagggcacggtggcaggaacaactatcctcgtctgtcccaacactgagcaggcactcggtaaacacgaatgaatggataagcgcacggatgaatggagcttacaagatctgtctttccaatggccgggggcatttggtccccaaattaaggctattggacatctgcacaggacagtcctatttttgatgtcctttcctttctgaaaataaagttttgtgctttggagaatgactcgtgagcacatctttagggaccaagagtgactttctgtaaggagtgactcgtggcttgccttggtctcttgggaatacttttctaactagggttgctctcacctgagacattctccacccgcggaatctcagggtcccaggctgtgggccatcacgacctcaaactggctcctaatctccagctttcctgtcattgaaagcttcggaagtttactggctctgctcccgcctgttttctttctgactctatctggcagcccgatgccacccagtacaggaagtgacaccagtactctgtaaagcatcatcatccttggagagactgagcactcagcaccttcagccacgatttcaggatcgcttccttgtgagccgctgcctccgaaatctcctttgaagcccagacatctttctccagcttcagacttgtagatataactcgttcatcttcatttactttccactttgccccctgtcctctctgtgttccccaaatcagagaatagcccgccatcccccagatcacctgtctggattcctccccattcacccaccttgccaggtgcaggtgaggatggtgcaccagacagggtagctgtcccccaaaatgtgccctgtgcgggcagtgccctgtctccacgtttgtttccccagtgtctggcggggagccaggtgacatcataaatacttgctgaatgaatgcagaaatcagcggtactgacttgtactatattggctgccatgatagggttctcacagcgtcatccatgatcgtaagggagaatgacattctgcttgagggagggaatagaaaggggcagggaggggacatctgagggcttcacagggctgcaaagggtacagggattgcaccagggcagaacaggggagggtgttcaaggaagagtggctcttagcagaggcactttggaaggtgtgaggcataaatgcttccttctacgtaggccaacctcaaaactttcagtaggaatgttgctatgatcaagttgttctaacactttagacttagtagtaattatgaacctcacatagaaaaatttcatccagccatatgcctgtggagtggaatattctgtttagtagaaaaatcctttagagttcagctctaaccagaaatcttgctgaagtatgtcagcaccttttctcaccctggtaagtacagtatttcaagagcacgctaagggtggttttcattttacagggctgttgatgatgggttaaaaatgttcatttaagggctacccccgtgtttaatagatgaacaccacttctacacaaccctccttggtactgggggagggagagatctgacaaatactgcccattcccctaggctgactggatttgagaacaaatacccacccatttccaccatggtatggtaacttctctgagcttcagtttccaagtgaatttccatgtaataggacattcccattaaatacaagctgtttttactttttcgcctcccagggcctgtgcgatctggtcccccagcctctcttgggctttcttacactaactctgtacctaccatctcctgcctcccttaggcaggcacctccaaccaccacacactccctgctgttttccctgcctggaactttcccaccagccccaccaagatcatttcatccagtcctgagctcagcttaagggaggcttcttgcctgtgggttccctcacccccatgcctgtcctccaggctggggcaggttcttagtttgcctggaattgttctgtacctctttgtagcacgtagtgttgtgaaactaagccactaattgagtttctggctcccctcctggggttgtaagttttgttcattcatgagggccgactgtatttcctggttactgtatcccagtgaccagccacaggagatgtccaataaagtatgtgatgaaatggtcttaaaaaaaaaaaaaaaaaaaaaa

SEQ ID NO: 7460 - DNA, 3391 bp, Homo sapiens
  misc_feature (1)..(3391): n=a,t,g or c
agcccccggtccctgagaagcggccccctgaaatacagcatttccgcatgagtgatgatgtccactcactgggaaaggtgacctcagatctggccaaaaggaggaagctgaactcaggaggtggcctgtcggaggagttaggttctgcccggcgttcaggagaagtgaccctgacgaaaggggaccccgggtccctggaggagtgggagacggtggtgggtgatgacttcagtctctactatgattcctactctgtggatgagcgcgtggactccgacagcaagtctgaagttgaagctctaactgaacaactaagtgaagaggaggaggaggaagaggaggaagaagaagaagaggaagaggaggaggaagaggaagaagaagaggaagatgaggagtcagggaatcagtcagataggagtggttccagtggccggcgcaaggccaagaagaaatggcgaaaagacagcccatgggtgaagccgtctcggaaacggcgcaagcgggagcctccgcgggccaaggagccacgaggagtgaatggtgtgggctcctcaggccccagtgagtacatggaggtccctctggggtccctggagctgcccagcgaggggaccctctcccccaaccacgctggggtgtccaatgacacatcttcgctggagacagagcgagggtttgaggagttgcccctgtgcagctgccgcatggaggcacccaagattgaccgcatcagcgagagggcggggcacaagtgcatggccactgagagtgtggacggagagctgtcaggctgcaatgccgccatcctcaagcgggagaccatgaggccatccagccgtgtggccctgatggtgctctgtgagacccaccgcgcccgcatggtcaaacaccactgctgcccgggctgcggctacttctgcacggcgggcaccttcctggagtgccaccctgacttccgtgtggcccaccgcttccacaaggcctgtgtgtctcagctgaatgggatggtcttctgtccccactgtggggaggatgcttctgaagctcaagaggtgaccatcccccggggtgacggggtgaccccaccggccggcactgcagctcctgcacccccacccctgtcccaggatgtccccgggagagcagacacttctcagcccagtgcccggatgcgagggcatggggaaccccggcgcccgccctgcgatcccctggctgacaccattgacagctcagggccctccctgaccctgcccaatgggggctgcctttcagccgtggggctgccactggggccaggccgggaggccctggaaaaggccctggtcatccaggagtcagagaggcggaagaagctccgtttccaccctcggcagttgtacctgtccgtgaagcagggcgagctgcagaaggtgatcctgatgctgttggacaacctggaccccaacttccagagcgaccagcagagcaagcgcacgcccctgcatgcagccgcccagaagggctccgtggagatctgccatgtgctgctgcaggctggagccaacataaatgcagtggacaaacagcagcggacgccactgatggaggccgtggtgaacaaccacctggaggtagcccgttacatggtgcagcgtggtggctgtgtctatagcaaggaggaggacggttccacctgcctccaccacgcagccaaaatcgggaacttggagatggtcagcctgctgctgagcacaggacaggtggacgtcaacgcccaggacagtggggggtggacgcccatcatctgggctgcagagcacaagcacatcgaggtgatccgcatgctactgacgcggggcgccgacgtcaccctcactgataacgaggagaacatctgcctgcactgggcctccttcacgggcagcgccgccatcgccgaagtccttctgaatgcgcgctgtgacctccatgctgtcaactaccatggggacacccccctgcacatcgcagctcgggagagctaccatgactgcgtgctgttattcctgtcacgtggggccaaccctgagctgcggaacaaagagggggacacagcatgggacctgactcccgagcgctccgacgtgtggtttgcgcttcaactcaaccgcaagctccgacttggggtgggaaatcgggccatccgcacagagaagatcatctgccgggacgtggctcggggctatgagaacgtgcccattccctgtgtcaacggtgtggatggggagccctgccctgaggattacaagtacatctcagagaactgcgagacgtccaccatgaacatcgatcgcaacatcacccacctgcagcactgcacgtgtgtggacgactgctctagctccaactgcctgtgcggccagctcagcatccggcgctggtatgacaaggatgggcgattgctccaggaatttaacaagattgagcctccgctgattttcgagtgtaaccaggcgtgctcatgctggagaaactgcaagaaccgggtcgtacagagtggcatcaaggtgcggctacagctctaccgaacagccaagatgggctggggggtccgcgccctgcagaccatcccacaggggaccttcatctgcgagtatgtcggggagctgatctctgatgctgaggctgatgtgagagaggatgattcttacctcttcgacttagacaacaaggatggagaggtgtactgcatagatgcccgttactatggcaacatcagccgcttcatcaaccacctgtgtgaccccaacatcattcccgtccgggtcttcatgctgcaccaagacctgcgatttccacgcatcgccttcttcagttcccgagacatccggactggggaggagctagggtttgactatggcgaccgcttctgggacatcaaaagcaaatatttcacctgccaatgtggctctgagaagtgcaagcactcagccgaagccattgccctggagcagagccgtctggcccgcctggacccacaccctgagctgctgcccgagctcggctccctgccccctgtcaacacatgagaacggaccacaccctctctccccagcatggatggccacagctcagccgcctcctctgccaccagctgctcgcacccatgcctgggggtgctgccatcttctctccccaccaccctttcacacattcctgaccagagatcccagccaggccctggaggtctgacagcccctccctcccagagctggttcctccctgggagggcaacttcagggctggccaccccccgtgttccccatcctcagttgaagtttgatgaattgaagtcgggcctctatgccaactggttccttttgttctcaataaatgttgggtttggtaataaaaaaaaaaaaaaaaa

SEQ ID NO: 7461 - DNA, 817 bp, Homo sapiens
  misc_feature (1)..(817): n=a,t,g or c
agtcctgcgtccgggccccgaggcgcagcagggcaccaggtggagcaccagctacgcgtggcgcagcgcagcgtccctagcaccgagcctcccgcagccgccgagatgctgcgaacagagagctgccgccccaggtcgcccgccggacaggtggccgcggcgtccccgctcctgctgctgctgctgctgctcgcctggtgcgcgggcgcctgccgaggtgctccaatattacctcaaggattacagcctgaacaacagctacagttgtggaatgagatagatgatacttgttcgtcttttctgtccattgattctcagcctcaggcatccaacgcactggaggagctttgctttatgattatgggaatgctaccaaagcctcaggaacaagatgaaaaagataatactaaaaggttcttatttcattattcgaagacacagaagttgggcaagtcaaatgttgtgtcgtcagttgtgcatccgttgctgcagctcgttcctcacctgcatgagagaagaatgaagagattcagagtggacgaagaattccaaagtccctttgcaagtcaaagtcgaggatattttttattcaggccacggaatggaagaaggtcagcagggttcatttaaaatggatgccagctaattttccacagagcaatgctatggaatacaaaatgtactgacattttgttttcttctgaaaaaaatccttgctaaatgtactctgttgaaaatccctgtgttgtcaatgttctcagttgtaacaatgttgtaaatgttcaatttgttgaaaattaaaaaatctaaaaataaa

SEQ ID NO: 7462 - DNA, 3302 bp, Homo sapiens
  misc_feature (1)..(3302): n=a,t,g or c
cggtgctgccgccgttgccgggagccgcggagacaagtcattacgttttcatttctcacaactgggctgagcacaactgaaccatgggggaacacagtccagacaacaacatcatctactttgaggcagaggaagatgagctgacccccgatgataaaatgctcaggtttgtggataaaaacggactggtgccttcctcatctggaactgtttatgataggaccactgttcttattgagcaggaccctggcactttggaggatgaagatgacgacggacagtgcggagaacacttgccttttctagtagggggtgaagagggctttcacctgatagatcatgaagcaatgtcccagggttatgtgcagcacattatctcaccagatcagattcatttgacaataaaccctggttccacacccatgccaagaaatattgaaggtgcaaccctcactctgcagtcggaatgtccggaaacaaaacgtaaagaagtaaagcggtaccaatgtacctttgagggctgtccccgcacctacagcacagcaggcaacctgcgaacccaccagaagactcaccgaggagagtacacctttgtctgtaatcaggagggctgtggcaaagccttccttacctctcacagcctcaggatccacgtgcgagtgcacacgaaggagaagccatttgagtgtgacgtgcagggctgtgagaaggcattcaacacactgtacaggctgaaagcacatcagaggcttcacacagggaaaacgtttaactgtgaatctgaaggctgcagcaaatacttcaccacactcagtgatctgaggaagcacattcgaactcatacaggggaaaagccatttcggtgcgatcacgatggctgtggaaaagcatttgcagcaagccaccaccttaaaactcacgttcgtacacatactggtgaaagacccttcttctgccccagtaatggctgtgagaaaacattcagcactcaatacagtctcaaaagtcacatgaaaggtcatgataacaaaggacactcatacaatgcacttccacaacacaatggatcagaggatacaaatcactcactttgtctaagtgacttgagccttctgtccacagattctgaattgcgagaaaattccagtacgacccagggccaggacctcagcacaatttcaccagcaatcatctttgaatcaatgttccagaattcagatgatacggcaattcaggaagatcctcaacagacagcttccttgactgaaagttttaatggtgatgcagagtcagtcagtgatgttccgccatccacaggaaattcagcatctttatctcttccacttgtactgcaacctggcctctccgagccaccccagcctctactacctgcctcagctccgtctgctcctccgcctgctccctccctaggacctggctcccagcaagctgcatttggcaacccccctgctctcttacaacctccagaagtgcctgttccccacagcacacagtttgctgctaatcatcaagagtttcttccgcacccccaggcaccgcagcccattgtaccaggactttctgttgttgctggggcttctgcatcagcagcggcagtggcatcagctgtggcagcaccagccccaccacaaagtactactgagcccctgccagccatggtccagactctgcccctgggtgccaactctgtcctaactaataatcccacaataaccatcaccccaactcccaacacagctatcctgcagtccagcctagtcatgggagaacagaacttacaatggatattaaatggtgccaccagttctccacaaaaccaagaacaaattcagcaagcatctaaagttgagaaggtgttttttaccactgcagtaccagtagccagtagcccagggagctctgtccagcagattggcctcagtgttcctgtgatcatcatcaaacaagaagaggcatgtcagtgtcagtgtgcatgccgggactctgcaaaggagcgggcatccagcaggagaaagggctgctcctccccaccccctccagagccgagcccccaggctcctgatgggcccagcctgcagctcccagcgcagactttctcttcagcccctgttcccgggtcatcatcctctaccttgccctcctcctgtgagcaaagccgacaagcagagactccttcagaccctcagacagaaacattaagtgccatggatgtgtcagagtttctatccctccagagcctggacaccccgtccaatctgattcccattgaagcactactgcagggggaggaggagatgggcctcaccagcagcttctccaagtgaagggcccatgtgtgctcacctctgggaaaagcgggtgagcaggaggcatgaggtacaatgcctgccatcatgggtcagaaatttgaaggatgaagaaatctactgtttgaaatcctcacctttcagacgtattttctttattcacatcccaggagcatccattttaaggaactattctttggaaaaaaacaaaaaacaaaaaaaacaacaaaaaaagctaagttataagtgaactgtttggctgcactgtatgtcacttttgcttgttgtcatgtgaacttggaaactaaggttactcgtgtgcataaaaattctaaatgaaagggtgtggtttccatcaatctgatgctgcccatcgcttgcactggggtctttgtggatcgggcaggagttttcagtgtgttgggtgttgctccttcctatgtgtcttttgaatctgaggctgacatttgcttggaaggccagacccttgctccatcagagagggcagtggcaaaggccagtgaggcagctgtgagttggacagggttcaggtgagatggtgttgtcatttgtgcttagtgttggtggtgctcagggtggataacacgggtcgttctgcagcccgcttcagcacaaataggcagcttaaggcctggctcacaggctgtggggttgatctggctctgcagaggccctaggcagcttgttgactgctgtctgttgatgacgtgtgtgcaaagcaggctctagcaacatgatcactgtccttgccttcctggttctttctctcggttggttgccagggcttgcagatcgcagtgaattttccttggggaacatcgctgttttgtcctagagtgaacttgtggcttatggccagtgctgtttggtggtctgccttctttttaatggtattttcttcctcagagcagaagggctgcattttgcttatcagaagaaggtgcagatttaagg

SEQ ID NO: 7463 - DNA, 3074 bp, Homo sapiens
  misc_feature (1)..(3074): n=a,t,g or c
gaattccggggagcaggaagagccaacatgctggccccgcgcggagccgccgtcctcctgctgcacctggtcctgcagcggtggctagcggcaggcgcccaggccaccccccaggtctttgaccttctcccatcttccagtcagaggctaaacccaggcgctctgctgccagtcctgacagaccccgccctgaatgatctctatgtgatttccaccttcaagctgcagactaaaagttcagccaccatcttcggtctttactcttcaactgacaacagtaaatattttgaatttactgtgatgggacgcttaagcaaagccatcctccgttacctgaagaacgatgggaaggtgcatttggtggttttcaacaacctgcagctggcagacggaaggcggcacaggatcctcctgaggctgagcaatttgcagcgaggggccggctccctagagctctacctggactgcatccaggtggattccgttcacaatctccccagggcctttgctggcccctcccagaaacctgagaccattgaattgaggactttccagaggaagccacaggacttcttggaagagctgaagctggtggtgagaggctcactgttccaggtggccagcctgcaagactgcttcctgcagcagagtgagccactggctgccacaggcacaggggactttaaccggcagttcttgggtcaaatgacacaattaaaccaactcctgggagaggtgaaggaccttctgagacagcaggttaaggaaacatcatttttgcgaaacaccatagctgaatgccaggcttgcggtcctctcaagtttcagtctccgaccccaagcacggtggtcgccccggctccccctgcaccgccaacacgcccacctcgtcggtgtgactccaacccatgtttccgaggtgtccaatgtaccgacagtagagatggcttccagtgtgggccctgccccgagggctacacaggaaacgggatcacctgtattgatgttgatgagtgcaaataccatccctgctacccgggcgtgcactgcataaatttgtctcctggcttcagatgtgacgcctgcccagtgggcttcacagggcccatggtgcagggtgttgggatcagttttgccaagtcaaacaagcaggtctgcactgacattgatgagtgtcgaaatggagcgtgcgttcccaactcgatctgcgttaatactttgggatcttaccgctgtgggccttgtaagccggggtatactggtgatcagataaggggatgcaaagtggaaagaaactgcagaaacccagagctgaacccttgcagtgtgaatgcccagtgcattgaagagaggcagggggatgtgacatgtgtgtgtggagtcggttgggctggagatggctatatctgtggaaaggatgtggacatcgacagttaccccgacgaagaactgccatgctctgccaggaactgtaaaaaggacaactgcaaatatgtgccaaattctggccaagaagatgcagacagagatggcattggcgacgcttgtgacgaggatgctgacggagatgggatcctgaatgagcaggataactgtgtcctgattcataatgtggaccaaaggaacagcgataaagatatctttggggatgcctgtgataactgcctgagtgtcttaaataacgaccagaaagacaccgatggggatggaagaggagatgcctgtgatgatgacatggatggagatggaataaaaaacattctggacaactgcccaaaatttcccaatcgtgaccaacgggacaaggatggtgatggtgtgggggatgcctgtgacagttgtcctgatgtcagcaaccctaaccagtctgatgtggataatgatctggttggggactcctgtgacaccaatcaggacagtgatggagatgggcaccaggacagcacagacaactgccccaccgtcattaacagtgcccagctggacaccgataaggatggaattggtgacgagtgtgatgatgatgatgacaatgatggtatcccagacctggtgccccctggaccagacaactgccggctggtccccaacccagcccaggaggatagcaacagcgacggagtgggagacatctgtgagtctgactttgaccaggaccaggtcatcgatcggatcgacgtctgcccagagaacgcagaggtcaccctgaccgacttcagggcttaccagaccgtgggcctggatcctgaaggggatgcccagatcgatcccaactgggtggtcctgaaccagggcatggagattgtacagaccatgaacagtgatcctggcctggcagtggggtacacagcttttaatggagttgacttcgaagggaccttccatgtgaatacccagacagatgatgactatgcaggctttatctttggctaccaagatagctccagcttctacgtggtcatgtggaagcagacggagcagacatattggcaagccaccccattccgagcagttgcagaacctggcattcagctcaaggctgtgaagtctaagacaggtccaggggagcatctccggaactccctgtggcacacgggggacaccagtgaccaggtcaggctgctgtggaaggactccaggaatgtgggctggaaggacaaggtgtcctaccgctggttcctacagcacaggccccaggtgggctacatcagggtacgattttatgaaggctctgagttggtggctgactctggcgtcaccatagacaccacaatgcgtggaggccgacttggcgttttctgcttctctcaagaaaacatcatctggtccaacctcaagtatcgctgcaatgacaccatccctgaggacttccaagagtttcaaacccagaatttcgaccgcttcgataattaaaccaaggaagcaatctgtaactgcttttcggaacactaaaaccatatatattttaacttcaattttctttagcttttaccaacccaaatatatcaaaacgttttatgtgaatgtggcaataaaggagaagagatcatttttaaaaaaaaaaaaaaaaaaaa

SEQ ID NO: 7464 - DNA, 4238 bp, Homo sapiens
  misc_feature (1)..(4238): n=a,t,g or c
gcgctctcaggcgggctccggcggcagcgacgcgagcgcggcgatggggagcggcggcgtggtccactgtaggtgtgccaagtgtttctgttatcctacaaagcgaagaataaggaggaggccccgaaacctgaccatcttgagtctccccgaagatgtgctctttcacatcctgaaatggctttctgtagaggacatcctggccgtccgagctgtacactcccagctgaaggacctggtggacaaccacgccagtgtgtgggcatgtgccagcttccaggagctgtggccgtctccagggaacctgaagctctttgaaagggctgctgaaaaggggaatttcgaagctgctgtgaagctgggcatagcctacctctacaatgaaggcctgtctgtgtctgatgaggcccgcgcagaagtgaatggcctgaaggcctctcgcttcttcagtctcgctgagcggctgaatgtgggtgccgcacctttcatctggctcttcatccgccctccgtggtcggtgagcggaagctgctgcaaggccgtggttcacgagagcctcagggcagagtgccagctgcagaggactcacaaagcatccatattgcactgcttgggcagagtgctgagtctgttcgaggatgaggagaagcagcagcaggcccatgacctgtttgaggaggctgctcatcagggatgtctgaccagctcctacctcctctgggaaagcgacaggaggacagatgtgtcagatcctgggcgatgcctccacagcttccgaaaactcagggactacgctcgcaaaggctgctgggaagcgcagctgtctttagccaaagcctgtgcaaatgcaaaccagcttggactggaggtgagagcttccagtgagatcgtctgccagctatttcaggcttcccaggctgtcagtaaacaacaagtcttctccgtgcagaagggactcaatgacacaatgaggtacattctgatcgactggctggtggaagttgccaccatgaatgacttcacaagcctgtgcctgcacctgaccgtggagtgtgtggaccggtacctgcggaggaggctggtgccgcggtacaggctccagctgctgggcatcgcctgcatggtcatctgcacccggtttatcagtaaagagatcctgaccatccgggaggccgtatggctcacggacaacacttacaagtacgaggacctggtgagaatgatgggcgagatcgtctccgccttggaagggaagattcgagtccccactgtggtggattacaaggaggtcctgctgacgctagtccctgtggagctgagaacccagcacctgtgcagcttcctctgcgagctctccctgctgcacaccagcctgtccgcctacgccccagcccgcctggctgccgcagccctgctcctggccagactgacgcacgggcagacacagccctggaccactcagctgtgggacctcaccggattctcctatgaagacctcattccctgcgtcttgagcctccataagaagtgcttccatgatgacgcccccaaggactacaggcaagtctctctgaccgccgtgaagcagcggtttgaggacaagcgctatggagaaatcagccaggaagaggtgctgagctacagccagttgtgtgctgcattaggagtgacacaagacagccccgaccccccgactttcctcagcacaggggagatccacgccttcctcagctctccctcggggcggagaaccaaacggaagcgggagaacagcctccaggaagacagaggcagcttcgttaccacccccactgcggagctgtccagccaggaggagaccgtgctgggcagcttcctcgactggagcctggactgctgctctggctatgaaggcgaccaggagagtgagggcgagaaggagggcgacgtgacagctcccagcggcatcctcgatgtcaccgtggtctacctgaacccagaacagcattgctgccaggaatccagtgatgaggaggcttgtccagaggcaaagggaccccaggacccacaggcactggcgctggacacccagatccctgcaacccctggacccaaacccctggtccgcaccagccgggagccagggaaggacgtcacgacctcagggtactcctccgtcagcaccgcaagtcccacaagctccgtggacggtggcttgggggccctgccccaacctacctcagtgctgtccctgcacagtgactcgcacacacagccctgccaccatcaggccaggaagtcatgtttacagtgtcgtcccccaagtcccccggagagcagtgttccccagcaacaggtgaagcggataaacctatgcatacacagtgaggaggaggacatgaacctgggccttgtgaggctgtaagtgtgtcagcacatttgccgcagtggatgtgtactgagggggctggaggcgaagggtgggagcatagcataggaacgctgcatagaccatggaggcctttgcgcagagagcagagaggatgacttgcggccaccaagtttctgtctccgcgggagtcccgtgcaagccatcagaatgttgaaatgagggtgaagagctcagatccctctctttggaaagtttagcctggaagcagttggccacactgtgtggagggcacctctctgtcccttccgtgtctcactgtctctggaagcttcagcccatgtgtgtcctggtgttcccagccccaccagagccccgtgccgggagctgacagctttcacgcttaaggcacgtgtgacctgggtagtcagacaccacttgagcccctgcccacatctgctggtttggggcttcagtggggagctgacagctgtgagcacaccactgtcccctcatccacctcggcctgcatggggcacccacttccttctgggtggggcttccatggtaagggggcctgcgtccctgcacactgcgaggactgccttgccacaggcccactccctacgacacgtgactcgttttagagctctgtcccagaggcgttcgtatgtgacccacagatggcgtcaatgtgaacacctctctttgtgctgaatttctgggccattcttttcctgtcttatttctaaatttccttcttccaagatgaaaacaaaagaaaaacttaaaacagaaggtattaaaaaaacaagagattcccaccattatttaggttcacctgcaaaacaaaaatcttactccagcccctcaatgccatcctgacacactttatgcaaaaagaattttcccagataggctagccagaaaaaacttcaagtcctctgtaacatctgaggtgaccaagaggcagaagagcagagcagtcgggggccgtgtcctggctgatcccaactgcagctctgctgtgggggcccgtgggagggaggcagacccctgggctttcctgctggccacggagactctgctcctgcatggaaagggagcctgggagccagcagcccacgcctggggagcctgcctggggccatgtgaccatggcctctccctgggaacgggctgaccacaacacaccctgctgccatccacttctgtttactctgcaaatgtaagaaagaaccacttggccagaagtgtcccccagatgcttttttttttttttttttggagacagttttgctcttgtctccccggctggagtgcagtggcatgatctcaactctcaactcactgtaacctccgcctcccggatactcctgcctcagcctcctgggtagctgggattacaagcacccaaccacgcccagctaatttttgtattttcggtagagacgggatttcaccatgttggccaggctagtctcgaactcatgacctcaagtgatccgcccacttcggtctcccaaagtgctgggattacaggcatgagccacggcgcctggcccccaaatgctcttgaaccggaaacccagggatgggagatgctcactgagctgctgcttttatgtgtgctggtgctatgtgtgttcatgtccgcggcagctgtctttttgctactataagggaattctggccaccctgggtggggtgtggtcggggtgagaacccaagcgttggaactgtagacccgtcctgtcgactgtgtgcccctgggcatgtgtgagcctcagtttcctcatctgtaaggggggcaatgatacctacctcacagggggttgtgaggattaaatgtgaggaggatagtggcaac

SEQ ID NO: 7465 - DNA, 5292 bp, Homo sapiens
  misc_feature (1)..(5292): n=a,t,g or c
ctcacaatgcaggcgctccagctctgacacgtgcacttctttattggaaaagaataaagcagtcactgatgtggcaggggcaggacacgagcagctgccgtcctcctcccagcgtgcctggcatggtcgcaggggagcgggtgcctggagtcccggtgacaccacggggcacactgagggagctgaggagccggggccgcgcagcctcctggatgctcagcggatcgtgtacttgtcccacttcttttcagggtcgtagggttcccagcggctggcgggaaagatgtgcttgttcttctcgtaccagctcctcagcaccaccttgcctgcatgggactcatccttctccacagtggcgtcactgagcaaccgcacatcgtcatgaacatcaaagttgaagagtggtccactcttcccccgtgccttggtgacgatgaagtcgtagaagctgtgatggtgagggatgatcaagtcctccttgatgtacatgagctgctccacccctgcggacctcagctcactgaagtctttccgaaggatctcgagcgccttctgcaggaactgctgcatggtgttgccctttctcatcttgactgtccgccggtgcccagagccatcccagtagctgaaggtgatctcgatctcctcactcttgatcttctcctgcttggcttcccactcctgccgcagctcttcccgaagccgattctcctcctcctcacggtctcgatcaggcaagaagcttgtgtcaacgtctgggttcttccccagttttctcttcttcgtggtgatctcttccctttccatctcctcctcatacatggccgcctcctcttcctcctcgcctccctcttcttcctcctccagggtgaaggacaggctggagatcttccgcttggcttccttcttacgctccttctctcgaagcttctccagcttcatctgcagctccttggactgctccttcttggccagctgcttctcccgctccttcaccagagcctcctgcttggccttcatgtcattcagggtcacgagacccacggtgctggacttgagctctgcctcccgggctgccgctggcaacatcgtgtcacccagctaagaaaatccgcgggcccgagccacgcgcctgtgaatcggagaggtcccactgcccgagtggagccgggctgagattcttctcaagttgagcctcagtgatcctgtggccgaagttagcgccttgacgtgggacaaccggacacgtcgccaggagagaactgaggcgccttctagcagttgtgacgccaaaatcacgtctccggagacccgcgccctccgccagccgggcgcaccctcgccggtagccttctttgtgcgccgtccggactcccagctcccggcccggcagccgagccccagcacaaagcagtcggaccgcgccgcccgcctcccctctcgcgtctccgcctcggtttcccaactctgcgccgtcgggccgcggcaggatgattgcctcgcatctgcttgcctacttcttcacggagctcaaccatgaccaagtgcagaaggttgaccagtatctctaccacatgcgcctctctgatgagaccctcttggagatctctaagcggttccgcaaggagatggagaaagggcttggagccaccactcaccctactgcagcagtgaagatgctgcccacctttgtgaggtccactccagatgggacagaacacggagagttcctggctctggatcttggagggaccaacttccgtgtgctttgggtgaaagtaacggacaatgggctccagaaggtggagatggagaatcagatctatgccatccctgaggacatcatgcgaggcagtggcacccagctgtttgaccacattgccgaatgcctggctaacttcatggataagctacaaatcaaagacaagaagctcccactgggttttaccttctcgttcccctgccaccagactaaactagacgagagtttcctggtctcatggaccaagggattcaagtccagtggagtggaaggcagagacgttgtggctctgatccggaaggccatccagaggagaggggactttgatatcgacattgtggctgtggtgaatgacacagttgggaccatgatgacctgtggttatgatgaccacaactgtgagattggtctcattgtgggcacgggcagcaacgcctgctacatggaagagatgcgccacatcgacatggtggaaggcgatgaggggcggatgtgtatcaatatggagtggggggccttcggggacgatggctcgctcaacgacattcgcactgagtttgaccaggagattgacatgggctcactgaacccgggaaagcaactgtttgagaagatgatcagtgggatgtacatgggggagctggtgaggcttatcctggtgaagatggccaaggaggagctgctctttggggggaagctcagcccagagcttctcaacaccggtcgctttgagaccaaagacatctcagacattgaaggggagaaggatggcatccggaaggcccgtgaggtcctgatgcggttgggcctggacccgactcaggaggactgcgtggccactcaccggatctgccagatcgtgtccacacgctccgccagcctgtgcgcagccaccctggccgccgtgctgcagcgcatcaaggagaacaaaggcgaggagcggctgcgctctactattggggtcgacggttccgtctacaagaaacacccccattttgccaagcgtctacataagaccgtgcggcggctggtgcccggctgcgatgtccgcttcctccgctccgaggatggcagtggcaaaggtgcagccatggtgacagcagtggcttaccggctggccgatcaacaccgtgcccgccagaagacattagagcatctgcagctgagccatgaccagctgctggaggtcaagaggaggatgaaggtagaaatggagcgaggtctgagcaaggagactcatgccagtgcccccgtcaagatgctgcccacctacgtgtgtgctaccccggacggcacagagaaaggggacttcttggccttggaccttggaggaacaaatttccgggtcctgctggtccgtgttcggaatgggaagtggggtggagtggagatgcacaacaagatctacgccatcccgcaggaggtcatgcacggcaccggggacgagctctttgaccacattgtccagtgcatcgcggacttcctcgagtacatgggcatgaagggcgtgtccctgcctctgggttttaccttctccttcccctgccagcagaacagcctggacgagagcatcctcctcaagtggacaaaaggcttcaaggcatctggctgcgagggcgaggacgtggtgaccctgctgaaggaagcgatccaccggcgagaggagtttgacctggatgtggttgctgtggtgaacgacacagtcggaactatgatgacctgtggctttgaagaccctcactgtgaagttggcctcattgttggcacgggcagcaatgcctgctacatggaggagatgcgcaacgtggaactggtggaaggagaagaggggcggatgtgtgtgaacatggaatggggggccttcggggacaatggatgcctagatgacttccgcacagaatttgatgtggctgtggatgagctttcactcaaccccggcaagcagaggttcgagaaaatgatcagtggaatgtacctgggtgagattgtccgtaacattctcatcgatttcaccaagcgtggactactcttccgaggccgcatctcagagcggctcaagacaaggggcatctttgaaaccaagttcttgtctcagattgagagtgactgcctggccctgctgcaagtccgagccaccctgcaacacttagggcttgagagcacctgtgacgacagcatcattgttaaggaggtgtgcactgtggtggcccggcgggcagcccagctctgtggcgcaggcatggccgctgtggtggacaggatacgagaaaaccgtgggctggacgctctcaaagtgacagtgggtgtggatgggaccctctacaagctacatcctcactttgccaaagtcatgcatgagacagtgaaggacctggctccgaaatgtgatgtgtctttcctgcagtcagaggatggcagcgggaagggggcggcgctcatcactgctgtggcctgccgcatccgtgaggctggacagcgatagaacccctgaaatcggaagggacttcctctttctctccttcttccctgttttaaattataagatgtcatccccttgtgtcagagacagaccccttggcttttgcttggcagagaggaccccactggactgggttttgtctctgcatctcattgtagagcttggtggctgagcttggccctattaagataaatagagttccaaataaggatttgttcacatgcatcataaccattcccattggttctcctaaaacatgaaaattatctcccttagtaatcccccttgccaaattccatgtccctgtataattctacaggatggggacactaatgaagatacggttgcttcaccttggagcctgaacatgacatttctaagtggggtgcatcccccagcactgatgttgttactgattctcctgtcagagatctgggaggtctccactgaggatgtgagcctgattatcctataggcagacgtggggagggtggaggggtgacagtggaggaaaatccatggatatccacgcagcagcccctctttaacctcatctacaagcatttgccctgtggattccagcatttgccattcctggaatcaaggaatcctgagtctgggcaatgaaaccaaagccaggagttgacgcatcctgcagttgggccagctgtcgcatctcagcggggcgcacatgttatccacaagcaatggacctttggggaagggggagtttttagtttgttttacaaatttttcctgcaaaagtggaatcactgtattttcattttaatttatatttgaaattttatttagttcttgagtagatctgcttcttcatcttgacatgtaatgaatggtcagttgtacgtaatgtatttatatgttaatttgttatgtatatagatgtgcaagtcttgtcagaattggcctcagtgtagttaaagggcagaaggggaagatactgactagtcatagaaatacctcattcgcctgtgggaagagaagggaagcctcttcagggtgagtgaatggcaaagcggttgcttctccg

SEQ ID NO: 7466 - DNA, 4858 bp, Homo sapiens; identical to SEQ ID NO: 3760
  misc_feature (1)..(4858): n=a,t,g or c

SEQ ID NO: 7467 - DNA, 4845 bp, Homo sapiens
  misc_feature (1)..(4845): n=a,t,g or c
ggtgaacctggacgagaggtgagcagtgagaccccctggggtggccctgattggggagaggggccctgtgagtctctgtgctgggtcagcaaggacaagccccagtcagggcctcggagaagggggcggcagcgctggccgacaggcgaaagcctaggtacaatgggaaggttgtcggggagagagacgggcatagagaccaagggctgcttctggaaggaggagggaaacttggtgaggaaactttggcttcaaagtgtgagtgagttgggcagaagaggagaggcctgggcttctgagaggggctgggggagcagagggggaggtggacagaggacagctctaggtgcgttcttgtttcactttgtccagggaagccccggtgctgatggcccccctggcagagatggcgctgctggagtcaaggtgagtgtctggtgtctgtgtgtgcagtgggttggggaggacattgcctcgggcctgacaggtcagctgggggtggcaggttggaacaagtctcatctcagcctagaaggaccttctgttcctgtctcttctggaacattcttctctgagcctgagacctctctcctgacagggtaatcgtggtgaaaccggtgctgtgggagctcctggaacccctgggccccctggctcccctggccccgctggtccaactggcaagcaaggagacagaggagaagctgtaagtatcctggaattcagtaaaagccgccttcccctgcgcggtggggctgaggcagtccctgggtttccgcagtctctggactaaggagcagtggcctcagatgcagaggaggcccccacctgtcctggcttttctctgacgctgcgctcactctctcctcagggtgcacaaggccccatgggaccctcaggaccagctggagcccggggaatccaggtgagtatccaagtgtcctgcactgagtccccaccagggataggctgggagggcagccagcctccaggtggttcctggcctccagccctgtgtttccggggattcctcagcttgggtgggacaggagggggctcctgtcctggccctgacctgactcaatcggtgtctgtcttgttcccagggtcctcaaggccccagaggtgacaaaggagaggctggagagcctggcgagagaggcctgaagggacaccgtggcttcactggtctgcagggtctgcccggccctcctgtgagtgtcactgcctgcgtgggacttcccgaggcctcctgccacacagagcccacttgagctccctgtgctgccaggacagcttgggatcaccctaagcagtttctaggatttcctcagggctggagggaggaggaagtggaaagggaatggggctgggacataaagctgttcccccagctcccagaatatagatagatatgtctgtgctgaccgtggccttttgcctcttccttctacacagggtccttctggagaccaaggtgcttctggtcctgctggtccttctggccctagagtaagtgacatggagttggaagatggagggggcccttcagagagtgtgggcctgtgttcccatggggagggaaatgctgctgcttctggggaagctgtgggctcaggggtcctcactcagtaatgggggcaggactggctcatgtgcctatggccagaaaagcgcctgaggccacaatggctgtaagacaaacatgaatcagcctctcgctgtcagacagaacagcattttacaaagaggagcttaggagggtaggcaagccatggagctatcctgctggttcttggccaaatagagaccaacttagggttccatgactgagcatgtgaagaactgggggcggagtggctggtgctatcaggacagccacctacccagccccagcgactccccagccttccctgtggtgaccactctttcctcacgacctctctctcttgcagggtcctcctggccccgtcggtccctctggcaaagatggtgctaatggaatccctggccccattgggcctcctggtccccgtggacgatcaggcgaaaccggccctgctgtaagtgtcctgactccttccctgctgtcgaggtgtccctaccatccgggaggcttgagctcttttttgctcagggcctcttttagggcatcagcctgcagctaacagtgatggcatcctttatcctgaggtctcctcagaggtcacagggcccatgatcagtgctgggaaactgaagagaagggctaaggaagaaatagacatggtgctgtggtttccttggtcctcgcctgctacacctccgccccacccatggggctgggaagagggacactctagtacattctagcaaatggggatggacatggaggggcactttcacacaatcctggctgatctctctgtttcctgctgcagggtcctcctggaaatcctggaccccctggtcctccaggtccccctggccctggcatcgacatgtccgcctttgctggcttaggcccgagagagaagggccccgaccccctgcagtacatgcgggccgaccaggcagccggtggcctgagacagcatgacgccgaggtggatgccacactcaagtccctcaacaaccagattgagagcatccgcagccccgagggctcccgcaagaaccctgctcgcacctgcagagacctgaaactctgccaccctgagtggaagagtggtaagcttggagaacaggatcccctgccccgggaagcagggagtcatcccttaggcctagcagcaagggaggagatgccccctagtacagggcagagctgggcctggaagtttccgccagagggttcctctcttatttcacagcagagaagctgcagccctggcccctgtcctgccatggctacctggccgaggtgacctcagggtggactccatccaccagctgggcactgcttctgctctctttgcatgtgttcttccttagggctggacttagctcatgcagatctccctgcccctgcatcctcccaggtccccctcctttcaggccacatgtgaacctcatcccttgtccctgtaggcctctctgtctctttcagtcaggcctgggtctctcaagcttttgtgtctgtgcctgtctgagcccccatgggtgctgcctcttccccctgcaggagactactggattgaccccaaccaaggctgcaccttggacgccatgaaggttttctgcaacatggagactggcgagacttgcgtctaccccaatccagcaaacgttcccaagaagaactggtggagcagcaagagcaaggagaagaaacacatctggtttggagaaaccatcaatggtggcttccatgtgagtacctgggtgccctagatgatgagcagagatggctcctcaaactctttcttttctttctccctggaagcttttagcaccttccccatattttcctccagttttctgttgggcttgagaggagggaaagaggaggaaaagtattttttccccacgtggaggtgggaaaagaggtcctctgagcttgctccactcctggaagcaaaaatgtccaactagctccctgctgccccagtacccttgaggtccttgaaccatgaactcttggcagcccctacagcccctggtcccattgaatgccagctcccaggcctcacactgccgctctctgccccaacagttcagctatggagatgacaatctggctcccaacactgccaacgtccagatgaccttcctacgcctgctgtccacggaaggctcccagaacatcacctaccactgcaagaacagcattgcctatctggacgaagcagctggcaacctcaagaaggccctgctcatccagggctccaatgacgtggagatccgggcagagggcaatagcaggttcacgtacactgccctgaaggatggctgcacggtgagtggggctgccagagagaagagctgcctgtgcccaaactgcctggagcagggctgagggttggcccgcggcagctgtcaggtcctaaagtgacaggatcatcagaggcatgagtttgagggtcatgtagagaagataggctgagtgacaggtgagagagaggcacatatcattccatcttctccattcccctggctcaggggaacaaaaccctacctggaacccagtgactactgtagaagtgttctcgcaatgtgtacagggtgaagaagcggtcacaggttgggagctcactgtggggagtggggaaggaggggaagggcagggtggagaagggccctgccgctaaggataggagttgaagtggagaggcctttggcaagccaagaagaggtctcaggagccccctcagtgtggttcaaccttgtgggctctgatgctcgccagtttgttcagttttgggcttctgggcagctggaactgggtagcaaggcatctactgaacagagcctcctccttttttctcccctagaaacataccggtaagtggggcaagactgttatcgagtaccggtcacagaagacctcacgcctccccatcattgacattgcacccatggacataggagggcccgagcaggaattcggtgtggacatagggccggtctgcttcttgtaaaaacctgaacccagaaacaacacaatccgttgcaaacccaaaggacccaagtactttccaatctcagtcactctaggactctgcactgaatggctgacctgacctgatgtccattcatcccaccctctcacagttcggacttttctcccctctctttctaagagacctgaactgggcagactgcaaaataaaatctcggtgttctatttatttattgtcttcctgt

SEQ ID NO: 7468 - DNA, 995 bp, Homo sapiens; identical to SEQ ID NO: 3766
  misc_feature (1)..(995): n=a,t,g or c

SEQ ID NO: 7469 - DNA, 2942 bp, Homo sapiens
  misc_feature (1)..(2942): n=a,t,g or c
cgagcctggcggtagaatcttcccagtaggcggcgcgggagggaaaagaggattgaggggctaggccgggcggatcccgtcctcccccgatgtgagcagttttccgaaaccccgtcaggcgaaggctgcccagagaggtggagtcggtagcggggccgggaacatgaggcagtctctcctattcctgaccagcgtggttcctttcgtgctggcgccgcgacctccggatgacccgggcttcggcccccaccagagactcgagaagcttgattctttgctctcagactacgatattctctctttatctaatatccagcagcattcggtaagaaaaagagatctacagacttcaacacatgtagaaacactactaactttttcagctttgaaaaggcattttaaattatacctgacatcaagtactgaacgtttttcacaaaatttcaaggtcgtggtggtggatggtaaaaacgaaagcgagtacactgtaaaatggcaggacttcttcactggacacgtggttggtgagcctgactctagggttctagcccacataagagatgatgatgttataatcagaatcaacacagatggggccgaatataacatagagccactttggagatttgttaatgataccaaagacaaaagaatgttagtttataaatctgaagatatcaagaatgtttcacgtttgcagtctccaaaagtgtgtggttatttaaaagtggataatgaagagttgctcccaaaagggttagtagacagagaaccacctgaagagcttgttcatcgagtgaaaagaagagctgacccagatcccatgaagaacacgtgtaaattattggtggtagcagatcatcgcttctacagatacatgggcagaggggaagagagtacaactacaaattacttaatagagctaattgacagagttgatgacatctatcggaacacttcatgggataatgcaggttttaaaggctatggaatacagatagagcagattcgcattctcaagtctccacaagaggtaaaacctggtgaaaagcactacaacatggcaaaaagttacccaaatgaagaaaaggatgcttgggatgtgaagatgttgctagagcaatttagctttgatatagctgaggaagcatctaaagtttgcttggcacaccttttcacataccaagattttgatatgggaactcttggattagcttatgttggctctcccagagcaaacagccatggaggtgtttgtccaaaggcttattatagcccagttgggaagaaaaatatctatttgaatagtggtttgacgagcacaaagaattatggtaaaaccatccttacaaaggaagctgacctggttacaactcatgaattgggacataattttggagcagaacatgatccggatggtctagcagaatgtgccccgaatgaggaccagggagggaaatatgtcatgtatcccatagctgtgagtggcgatcacgagaacaataagatgttttcaaactgcagtaaacaatcaatctataagaccattgaaagtaaggcccaggagtgttttcaagaacgcagcaataaagtttgtgggaactcgagggtggatgaaggagaagagtgtgatcctggcatcatgtatctgaacaacgacacctgctgcaacagcgactgcacgttgaaggaaggtgtccagtgcagtgacaggaacagtccttgctgtaaaaactgtcagtttgagactgcccagaagaagtgccaggaggcgattaatgctacttgcaaaggcgtgtcctactgcacaggtaatagcagtgagtgcccgcctccaggaaatgctgaagatgacactgtttgcttggatcttggcaagtgtaaggatgggaaatgcatccctttctgcgagagggaacagcagctggagtcctgtgcatgtaatgaaactgacaactcctgcaaggtgtgctgcagggacctttctggccgctgtgtgccctatgtcgatgctgaacaaaagaacttatttttgaggaaaggaaagccctgtacagtaggattttgtgacatgaatggcaaatgtgagaaacgagtacaggatgtaattgaacgattttgggatttcattgaccagctgagcatcaatacttttggaaagtttttagcagacaacatcgttgggtctgtcctggttttctccttgatattttggattcctttcagcattcttgtccattgtgtggataagaaattggataaacagtatgaatctctgtctctgtttcaccccagtaacgtcgaaatgctgagcagcatggattctgcatcggttcgcattatcaaaccctttcctgcgccccagactccaggccgcctgcagcctgcccctgtgatcccttcggcgccagcagctccaaaactggaccaccagagaatggacaccatccaggaagaccccagcacagactcacatatggacgaggatgggtttgagaaggaccccttcccaaatagcagcacagctgccaagtcatttgaggatctcacggaccatccggtcaccagaagtgaaaaggctgcctcctttaaactgcagcgtcagaatcgtgttgacagcaaagaaacagagtgctaatttagttctcagctcttctgacttaagtgtgcaaaatatttttatagatttgacctacaatcaatcacagcttatattttgtgaagactgggaagtgacttagcagatgctggtcatgtgtttggaacttcctgcaggtaaacagttcttgtgtgggtttgggcccntctccttttggaaaaggtaagggtgaaggtgaatcttgcttattntgggggtttcaggtttnagtttttaaaatatcttttggacctgtgggtgnaaaagcagaaatacagntggattgggttatgagtatttacgt

SEQ ID NO: 7470 - DNA, 2139 bp, Homo sapiens
  misc_feature (1)..(2139): n=a,t,g or c
gaggtgggaggagttccctgcagcctgcggggccaagaagaaagtgctaagctgaggagccgcagtcggaggaccccagggacccgacaggaagtctccgtacgaccccaacggatccacatgcccggaagcccaggcgacactaagccagcgctggggaactgacgtactcctgcagtcgcagggcgctccatgcctctctgtcctcttctttgttgtgggtaacgttctctgcgggagacctgaggttttccaagggggacatgccagctacactggccttggcgccctgagctaagcaccaggactcacagcctagcacgaaggcaggtagcaccttcacccgccgcggacgataggcgctctcctgtacctcctttagctcgcgaggcccgcccttcgcgaggtcccagagaaaagcaggctgtggaaaactggcgcccccttctttcacccaccttcttacccctgtcagcgccgagatctgtagcagaggttcctggtctgaaccaccgattggcaaagaaagctgcagattaaacttctcgttttacagagaaggaaactgaggcccagacagccgaaggagaggcagtctatggagcgcagcggtaaagagcaaggggttggtggccccagaatggaacctcagctctgccaggtaaccaacagctgtgtgaccctagacgagttccgcagtctctctgagcctcagtttccttactggtcaaacgggataatgggatactagcgcccacctcatagagttgttctgaggattagataggagagcagtgtgggcctttgactcaatcaactttacagtttttgttactactactgtttaaggacaggaaacaagttagtggcaacgcgagctgaaacccgggtctctcaacgtccagttggaggttttacccaccacccctctacctgttcagagctaatgggatgcagaggcgaggacagcccctggaaaaccatgtggcgttgatacactggcaaagcgcaggcatcccggcctcgaaggtgcataattattgcaatatgaaaaaatcgaggctgggtaggagcagggcagtgaggatttctcaacccttactttcaccccggcgctgtccactgcatctgacagagcgcggagctgggctgctacagccgcaaccccagggaccagtgcgcacgcctgggccgccctccgggagtcacccagcggccgcggacaactgaataaacaccccaaagcgctgcggtcggtcaagggcggggacagccacagtgcgcgcggggcccgcaggccgtaataaagagtggctcgacctcgctgctggcctgtcgcgggagaggaacaagctttcgactagcgcctctccccggggcccgcgccccgagccccacgccaagacagcccaacagctgttcctcccctccccgccgactccaactcttcggaatctgcccactcgggggctgcagggcaagtgtttaggatggttcccagccccgcgctgcgcggtgaaaatttcaacgtcattccttcaattaaaaaaaggggggggcaagggaggggctttgtgataactactcccagcttcttctgatcatttcaaaattaagtcgattttttttaaccagtccccacttactgtcctaactctcctcgctgaccctatctgggagccggaaccgttaggtactgccgaatgcggtgcaaatttcccctctcccccagttcgcagtgcctggagccgctggggttactcgtctgttctgatgccaccgcgagatggtccccgagctccccgagagtcctcagtgaaaggattccgcggcactgcctctattattataccgtaaatctttttaaattctggaactaattatatagaggatatgtctcaatttgttctgcattaatgccacagtggggatggaggccaggccgtggccagagcagatacgtaggcccatgaaattgatgaactgagagttgtcttccagtcctgagcgcaccatctggaattccagtctgaggttacaattagaactcctgaccccagattcaactttgtaaacaacaggggaaaaaaatggggaaaagaaaaaccacgagcgaggaaaaaaattatctgcacctgt

SEQ ID NO: 7471 - DNA, 720 bp, Homo sapiens
  misc_feature (1)..(720): n=a,t,g or c
ctaaagggctagagcagaacataaaagattctttccaaaaagtgacactgagcagatatggaaaatatggacataagaatttacagttaagaaaaggctgtaaaagtgtggatgagtgtaaggaacaccaaggaggttataatggacttaaccaatgtttgaaaattaccacaagcaaaatatttcaatgtaataaatatgtaaaagtcatgcataaattttcaaattcaaatagacacaagataagacatactgaaaataaacatttcagatgtaaagaatgtgacaaatcactttgcatgctttcacgcctaactcaacataaaaaaattcatactagagagaatttctacaaatgtgaagagtgtggaaaaacctttaactggtccacaaacctttctaaacctaagaaaattcatactggagaaaaaccctacaaatgtgaagtatgtggaaaagcctttcaccaatcctcaatccttactaaacataagataattcgtactggagaaaaaccctataaatgtgcacactgtggcaaagcctttaaacagtcctcacaccttactagacataagataattcatactgaagagaaaccctacaaatgtgaacaatgtggcaaggtctttaagcagtccccaacccttactaaacatcagataatttatactggagaggaaccatacaaatgtgaggaatgtggcaaagcttttaacc

SEQ ID NO: 7472 - DNA, 386 bp, Homo sapiens
  misc_feature (1)..(386): n=a,t,g or c
gtgggtggcaccgatcccgggccggccgtgcttcacgggtttgtaggtgatggagaactcgcccaggtagtggccgatcatctctggtttgatctccacctggttgaaggtcttgccgttgtacacgcccaccatgctacccaccatctccggcagatcgatcatgtccctcaggtgcgtcttcaccacctcaggcttctccatgggtggtgcctcctttttggcctttctcaagcgcttgagcangtgagtgttgcttccgccgaagaccacggttcaggcgcctcctctgggcgggcgctgtacagctgcatcagttgctcataggacatgtcgagcagttgggtcgaggtctacgccacggtaggtgaacttgcggaaggtgc

SEQ ID NO: 7473 - DNA, 265 bp, Homo sapiens
  misc_feature (1)..(265): n=a,t,g or c
gttgagcachbggtactttattgatggtacatgacaaggtgcggctccctaggccccbccccbcttcavnbggtctacatggcaactgtgaggmggggagattcagtgtggtgggggmctgagtgtggcagggmctccccagmagtgrgggtctcycyactbcctcttgtgctctyscyggggctggtggtccaggggtcttactccttggaggccatktgggccatgavsabccaccacccttkttbctktagccaaatycgtt

SEQ ID NO: 7474 - DNA, 384 bp, Homo sapiens
cccagtttttacatttatttaaacagaaaacgtgcacatgagcygcctactcattttcttcacygcgcascyyggcatccgggtyggtgactctgatggccagtygggcagctctttccacgayggctttgcsgttctcggaggaaacattgtgagcgatctcggmcacagtaagatttgtygcacatcagcagcacttccagctccbbgacgktbgccgaccaggaacyyccgsgaagccactccggcagcatgtgctttgttttthcgtcgcttccataaccaatgycgggcatcamgdtccsgcccttgaatcttctacgaacccygtcgtcaatscctccsggtttccgccakttacggttaatttygacatatcggtct

SEQ ID NO: 7475 - DNA, 372 bp, Homo sapiens
ctagcccagcggtcctttatttttwhhtttaacacctattaygccatgaattcaycgggaataggttccagcagytcmggbtccttcccaycggttctmacaaagtgtgyttctccgggtggagcaggctggcgctttagttgaacccaggtacctttmtctcccgbttctttmtttttcygatcattttccttcacacgtttcmsgaagytatcycggctcttagagtvyttaacgtgctcaatacgcacattawttctcycsgmaagaatctcgcccttaactygtttgtttacaacaatgccaacagcatgcygggwaacattgtagactcttccagtttycgccatggtaacactcgscggggyattc

SEQ ID NO: 7476 - DNA, 255 bp, Homo sapiens
tgtgcacttttattcaacccgtctcaagtcagtgtacaggtaagcccyggbtgcctccacccaytccccgggrgaccaaaagccttcatacatctcacgycsggggacaaaaacsggggamgggggggcacgaaggytcatcattcaaaataaaacaaaataaaaacgtattacgsgcgargattaaaaaaatttcscattacataatttacacgggaggvaatggctatcacctcccccsgcggcsggcttggg

SEQ ID NO: 7477 - DNA, 358 bp, Homo sapiens
  misc_feature (1)..(358): n=a,t,g or c
aahvggnttagtttttttttattttttacaaatataccsgagaatcatgcaatvchgccagcattggatgcaatccggggccacaagycygcacacncctttgctacygsgtcctgtaatggcagaacctttcatctcgcctttattgttcactatgmctcctgcattatcttcaaaataaagaaacacgscatcttttctacggtatgactttcgttgtcgatsccactgctggatgtacctttkkkbtgrgctctggtttgsnttnttgactgtgggcatcaccatgtcacccacaccagcagggggragtttkttagccgtccttgatcccttcacggggrtgatatacaggkkt

SEQ ID NO: 7478 - DNA, 363 bp, Homo sapiens
ccgcgtctgatcttatttattcgttactcaaaaaatcttatttccgmccggattcagacttagaagtagaagctcgcagagaggaaagtctgcgtctcttcgcaattygttccyggcggttctccttagcctccttcattctctyggccaaaagtttagcatattcygcagcctcttctttattttwmycggtacgstgcttcttcagagcaatacgccgccgtttgtgctgcaggacacgtggrgtaacaagacggtgaatcttgggtgctttggtcctaggtttcttaccttctttatttmcrggctttcttacaacatactggcgggcatcatcttctttagagagattgaaaagttcgc

SEQ ID NO: 7479 - DNA, 395 bp, Homo sapiens
  misc_feature (1)..(395): n=a,t,g or c
gctgctccagbcaatgaaagggacactttattgaggctccagggccacggggcctgggmaggaggctgmmcttcaaggaaagaacaaccttatttgaccttbttcttgggacgcaggkttgtttggbgtkaccamacttctwatnnnnnnnnnnnnnnnnacgamnnnnngaaggcgagcatagcacttgcggcagaycatcttgtcgmagtygtmytyctgggcaagctggcggagagaaggctcamtaatgccacctcgcaggcgcaacaccaggtgtmcggbsgactctttctggatgttgtagtctgagagagtgcggccmtccyccavactgtttgaccgcaawtatcagaasgatsctggtmagrgagggwtatcccaccytgtcwaaa

SEQ ID NO: 7480 - DNA, 276 bp, Homo sapiens
ctgtcaagctgttctttatttcagggagagggcaggggaggggctcagtctttcttggcagcagctttcctcatggcggccagtacgttgctcagctcctcccgcttcctcttggcgcggatgtgcgtccccacccttttcttgataaatttgagggcccgtttgtccttggagaccttcagtaactccatggcgcgccgctcgtacggggcaaagcacacacctcccgaatcatgtcccgcacgaacttggtgtgtttggtcagacgcccgcggc

SEQ ID NO: 7481 - DNA, 355 bp, Homo sapiens
raatgkvagccaaagwtttatttcttmatttcttgcatttgaaatactcttcaatgmcatccttggcctgrgmctccttgccatagtccttaactaytacamaactgaaaccaaccactttasggggtttcccctcyctgycaattttacaaaggcctacccattctcctagtttcttgttgtcatcaaccttawttaggttgwtttggtgttcagcamaaagggcctccaccaacttgacatacataggytcatcacagttggatgmaagcacacaaagatgggcttggcgcttcccaaggctttggcagttcgsgaattccacgtgctaggccatcgtggatgagggcascct

SEQ ID NO: 7482 - DNA, 308 bp, Homo sapiens
amcamccsgtcatcaatttattaaaatagttgacttaagcatcyscaatsgtgacttccacctcaacycctggctcaatactgatggaagtaatctgcttaacaatctcagaaggactgtgcaagycaatgagtcgcttgtsaattctcatctggaaacgatcccacgkcttagaaccctcaccacaaggagtttttcttgtagtgattctcaaagtcttggtaggcattcgaacysgtcctttcactttgagattctttycttttbcgcccctytatcaagtcagcacacaccttttccaaggwttt

SEQ ID NO: 7483 - DNA, 198 bp, Homo sapiens
  misc_feature (1)..(198): n=a,t,g or c
nnnaanctgatagaaggtcttgctctgtcacccaggctggagtgcagtggtgccagatcatggctcatgacagtctcaacctcccaggctgaagtgatcctcccaccttacctccccatccccccaatccccagtagctagctgggactacaggagtatgctactgtgtccagataattaaaaaaaatttttttcctt

SEQ ID NO: 7484 - DNA, 470 bp, Homo sapiens
  misc_feature (1)..(470): n=a,t,g or c
tttttttttttggtatataaactatttattaacagacaaggcctacagacttacttcttcttagacacacccacgatgcggccacggcagcctgtggtcttggtgtgctggcctcggacacgaaggccccagaagtgacgcagccctctacgggcccgaatctttttcagtcgctccaggtcttcacagagcttgttgtccagaccattgggctagggacctgggctatattttccatcctttacatccttctgtctgttcaagaaccagggctgggcatcttgtactagtgtgggattctgcataatgggtgatcacatgtttccacctcatcctcagtgagttctcccgccctcttgggtggagggtcagtgtctgcttttccttcaacaccacatggaggcatatttttcgggcccacaccctttaacgggcagttgattgggcaaagggcnttttttcccggccan

SEQ ID NO: 7485 - DNA, 362 bp, Homo sapiens
  misc_feature (1)..(362): n=a,t,g or c
aattttttattttgttctactcggttttattcttattgctcaggcttgagtgcactggcctcttctnngcgnaacctccgcctcttgggttcgggtaatgatggttccacgtcagcggccctccncntcttgggtttgcgtgacggttccacgtcaccgaccctccgcctcttgggttcgggtgatgatggttccacgtcagcggccctccncntcttggggtttgcgtgacggttccacatcaccgaccctccgcctcttggggttcgggtgatgatgggttccacggtcagcggccctccgcctcttggggtttgcgtgacggttccacgtcancgaccctccgcctcttggggttcggg

SEQ ID NO: 7486 - DNA, 449 bp, Homo sapiens
tttttttggctctagagggggtagagggggtgctatagggtaaatacgggccctatttcaaagatttttaggggaattaattctaggacgatgggcatgaaactgtggtttgctccacagatttcagagcattgaccgtagtatacccccggtcgtgtagcggtgaaagtggtttggtttagacgtccgggaattgcatctgtttttaagcctaatgtggggacagctcatgagtgcaagggcgtgtggggtgtaattattatacgaatgggggcttcaatcgggagtactactcgattgtcaacgtcaaggagtcgcaggtcgcctggttctaggaataatgggggaagtatgtaggagttgaagattagtccgccgtagtcggtgtactcgtaggttcagtaccattggtgggcaaattgatttgatggaggggggggtctttggac

SEQ ID NO: 7487 - DNA, 1361 bp, Homo sapiens; identical to SEQ ID NO: 3781

SEQ ID NO: 7488 - DNA, 425 bp, Homo sapiens
  misc_feature (1)..(425): n=a,t,g or c
cagctaaaacagcggaagaggngatttattatatggntgttacactcggccacaaataaacacagaaatagnccagaatgtcacaggnccagggcagaggaccaacatgggcattttgtttatgagcaaggtgggtctcagaggtgancggcgatcagagggcgatgaagttctaganccnttgagacaagctctagacagtagcatgcagtcccacaacttgtaccagcatccccagcgtctgggcattccatgtttctgctcctgtgggcctccacgggtgcaacaaggctaggcgggtttacttgggncctctgcctcatctttcttcttttgcgcttcagcctgcgcattcgnttcttcctccattgggnttctcngggcgcagaggtttccaaaaaaaagantcgtggccgaatttttgg

SEQ ID NO: 7489 - DNA, 326 bp, Homo sapiens
  misc_feature (1)..(326): n=a,t,g or c
ttttttttttttttttggtggttgctttgaactttatttcgagaaaaacagaagataaatgtatcaaaagaacacacaggtngcgggggaggcgcacagtnggcngcacttngcggtgggcatccgggctaaggctttacttggcggcagtctcatcggattttgcagcttctgggcccccaagctgggcccgcgactcgaaggtgactgggatggtnatctcgttggactgcgtggctaagcttgggcatgggggcctccacggtcagtntgccctcaggggacagggaggaggaaacttgggttggggtccanaccggggggca

SEQ ID NO: 7490 - DNA, 265 bp, Homo sapiens
tttttgtgagcaacagagatagtctttattcaaacgcagagagatccataacatggaaacactgacgcttccgaaaccgccccatttattcacttctcaagtggcccccgcttggatgcgccctcgggagagtgggctcagcacagcctagagcaccaggtctgaggtatctgcaaccacgtgggagccaggcccctggacgatgaaggacaatctcctggagcagcaataacttataaggagacataatttagagtagctggag

SEQ ID NO: 7491 - DNA, 420 bp, Homo sapiens; identical to SEQ ID NO: 678
  misc_feature (1)..(420): n=a,t,g or c

SEQ ID NO: 7492 - DNA, 282 bp, Homo sapiens
ttttttttttttttttttttttttttttccttttagaaaagcaggtttattggtcgggctgctcaccaggacacagcaacgtgagaggttccccaagcccacagaaaactgcatctgcccacagctcaggccccttcaggccatcagcaccaagggaccttgtccacaatccccaacctccctcggcagagggttcttcagccattcagaggagagaagagaaccgagaaagggaaaaggaagaaaaaaaaaaaaagcaaagctttgtattgtataaaaggt

SEQ ID NO: 7493 - DNA, 290 bp, Homo sapiens
  misc_feature (1)..(290): n=a,t,g or c
aggntttattttggaccaaaaaaaaaaccacaattgttttctagctggaagantgggcaaggggggtcccagacagtaaactcccccacgggtgggttgagcctcaggtggggggtctcctgttgtctgtgcttccccacacagcagcctccctcctggngtctgtggcagccacgggaggggcagactaggaggagctgccacagttnttcacttgggcaggaagtcagaggactcagacaccagcttcccatcgcgggtntcgatcttcttnanaaccacggccctgg

SEQ ID NO: 7494 - DNA, 341 bp, Homo sapiens
  misc_feature (1)..(341): n=a,t,g or c
hccsgkacaaatttntttattygamggaayggtacaaatcaaagaacttaagcvgatgtttcvgtacaacttatagaaamrgtaaaggaaaccccaacatgcatgcactgcctcngtgaccagggaagtcaccccacggctayggggaaattagcccgcrgcttagctttcattatcactgtctcccmgggtgtgcttgtcaaagagatattccgccaagccagattcgggcgctcccatcthgcgcaagtttgtcacgcggtcacccaattctttgayggctttcacctgctcattcmggtaatgtgtctcaatgamgtcacacaaacsgggktcatttt

SEQ ID NO: 7495 - DNA, 482 bp, Homo sapiens
tttttgctttttaaattgctttattagctttaaatttttccatgcaaatgggtgaaactactgctgacagaaacttacactgagtgcaaaggcaatcttcaaatagaagctggcaacacaagacccacttgacacatggaaataacatagggttcacagcaaacggatcagtaaaggcatattaggaaaatgcaaggaaaaagaaaacagcgggaatcacagtattaatctcatgataaatggcaggagtcaaggcataaggcaaaattcatcatgatggtcatggtgattagagagctcccccataaggatacgcagacaattcctcaactgcagctccctaagttttcttctgatttctctcatctcctccatgaatatttccatatcatctccatctccacccatcccatcattgatctgcctattgggtatgggccatcgaaaattaggggcaagtcggcgagcctggtccccgtcgg

SEQ ID NO: 7496 - DNA, 511 bp, Homo sapiens
ttaggtatataaactatttattaacagacaaggcctacagacttatttcttcttggacacacccacggtgcggccacggcggccagtggtcttggtgtgctggcctcggacacgaaggccccagaagtgacgcagccctctatgggccgaatcttcttcagtcgctccaggtcttcacggagcttgttgtccagaccattggctaggacctggctgtattttccatcctttacatccttctgtctgttcaagaaccagtctgggatcttgtactggcgtggattctgcataatggtgatcacacgttccacctcatcctcagtgagttctcccgccctcttggtgaggtcaatgtctgctttcctcaacaccacatgagcatatcttcggcccacacccttaatggcagtgatggcaaaggctattttccgccgcccatcgatgttggtgttgagtactcgcaaaatatgctggaacttttcagggatcactagagacatggctgcagcag

SEQ ID NO: 7497 - DNA, 238 bp, Homo sapiens
  misc_feature (1)..(238): n=a,t,g or c
cccctccccagagtattaacgctccaagagtattattaacgctgctgtacctcgntctgaatctgccggggccccagcccactccaccctgccagcagcttccagccagtccccacagcctcatcagctctcttcaccgttttttgatactatcttcccccacccccagctacccataggggctgcagagttataagccccaaacaggtcatgctccaataaaaatgattctacctac

SEQ ID NO: 7498 - DNA, 380 bp, Homo sapiens
aaaacaagcaaattttattaaaggrraaattttgcaggtttaaggtttgcaggtgaaattttgtmsssgaaaaggtttacttttcaccagtctgthctggcatgcttctaatgatgtcagagtcacctggrtcaatgatagccagtgtgcacactctgtagtattttccgcatgctgtgcccagttcaatattattgccactgtagtgatggacaccagttttagccaacatagcatagtactctatttcagatttcctcaaagctgggcagttgttagcgagaatgmccaatttcgctttgccttgtctgatcatcttcagagtctkcttgtacccrgggcgtactycccacttttcatarcgggtggggcctagagtt

SEQ ID NO: 7499 - DNA, 477 bp, Homo sapiens
  misc_feature (1)..(477): n=a,t,g or c
gaggaattaacagtctttattgggctcagaccaggagtccgtgggtcttgaggacctctgtgtatttgtcaattttcttctccacgttcttctcggcctgtttccgtagcctcatgagctgtttcttcttccggtagtggatcttggctttctctttcctcttctcctccaaggtggctgtcaactggcctggtacttcccacccaaccttcggtgaagccaggcgccccaagataagggaaaacttttctttggtagggcttcaaaacgcaccgacccttgaaggggcaagcaggnaaccaacaatccggcttttttccttggtccgtaagggccggtttggaatgccggtnaaaaaaacctttgaagaacnggtcccanaagcgggccttgggcctccgcttnggggtttttgttgggggcancaataacctcggaagggttcngccaaaaaaaaatncgggcttggggggccct

SEQ ID NO: 7500 - DNA, 506 bp, Homo sapiens
tttttttttttttttttctctttgataatactgtttattgtccacggaccgagcgattgctcaagaatgatacaaagcatcagagacatgcgcagtctgcttgtcaactttcaacaactcttgtgtgttcccagcaccggaaggtctcagacttcatattccagcataaacacagtgctcccctcccccaaaaatccaaacggaaacaaaatcaacagagctttaaattacggcagcaagtccaatatttcttaatacttatcaagcaaagatttgaaaataactacaatgtaaactttattttaaatattttgagttgcttgcaggatgaaaataggagaagagagctgtgcttagaacataacatataaattaaacgatgccaaatggagagccttcttaaactatatatatattgccactatttattgtgaaggtatttgagcggcttcctctgtcagctgccacccggtcttcttaacctgttttgtttctgccctcgtgcc

SEQ ID NO: 7501 - DNA, 431 bp, Homo sapiens; identical to SEQ ID NO: 753
  misc_feature (1)..(431): n=a,t,g or c

SEQ ID NO: 7502 - DNA, 145 bp, Homo sapiens; identical to SEQ ID NO: 3505
  misc_feature (1)..(145): n=a,t,g or c

SEQ ID NO: 7503 - DNA, 372 bp, Homo sapiens; identical to SEQ ID NO: 792

SEQ ID NO: 7504 - DNA, 385 bp, Homo sapiens; identical to SEQ ID NO: 776
  misc_feature (1)..(385): n=a,t,g or c

SEQ ID NO: 7505 - DNA, 291 bp, Homo sapiens
  misc_feature (1)..(291): n=a,t,g or c
tttttttttttttttttttttttttttttttttggaacctcgggccacacagctcaggcacacaccatcggggctactggctgcttggagtttattttccgcttggtgccaggtgcacagttccaggtgtcaggaaagctagcgagtgctggggccgggcggtagagagcggggctctcactggtttttggtgtctgctgtgttgatgcgaaggtctgcttgctgcagccgcctagtttacagggtggggggtgggaggtggggaggggggcgagggatgcggagtgggga

SEQ ID NO: 7506 - DNA, 405 bp, Homo sapiens
  misc_feature (1)..(405): n=a,t,g or c
caaacaacctgtttatttgggcttatgatttactaactgcaggtctatgtgcaggaaggccagcatcccctcctgccgttgtcacccacatccacagagcagccctagtgccaggtgcagccactgccacccacggcacacgggaacaggacccatgctgcaggcctgctctcctgcccagggagatgccacgtgtgtctgtccggcagcttcatgacacagttaccaagcagctagggagggcttagatttgttggtgtccccaaggcctctccctcgggggcttgggcgcatccccanagcccccaagggatgggggctctcgcacgggggcccaattccacagctccacggctggcgcccctcccgtgcccatgggggagaagccaatttatttccagaggn

SEQ ID NO: 7507 - DNA, 358 bp, Homo sapiens
  misc_feature (1)..(358): n=a,t,g or c
actgcctgtataatcccctctttattcaaacgmcgctgtccaaaaygatttgacctttmcggaataatcaaatttamgmgtttatgcagcmsgcttcttctcctcygtagtmggtttcttctctgcmggcttcttttcccgggctggtttctcggtagctgctgcctttwttcccaccmgcggcttcttctgcttcttaacaccaacagcagccttctttcctttcttacctaccaccsgcttctygcctraaaccgccgccttctcatctgattycggcttgwagtgccgctgctgaagmastgccttatccacccggrgcttgtgattcccggcctggcgaagaatggtgttccgg

SEQ ID NO: 7508 - DNA, 4695 bp, Homo sapiens
  misc_feature (1)..(4695): n=a,t,g or c
cccgggctgggctgagacccgcagaggaagacgctctagggatttgtcccggactagcgagatggcaaggctgaggacgggaggctgattgagaggcgaaggtacaccctaatctcaatacaacctttggagctaagccagcaatggtagagggaagattctgcacgtcccttccaggcggcctccccgtcaccaccccccccaacccgccccgaccggagctgagagtaattcatacaaaaggactcgcccctgccttggggaatcccagggaccgtcgttaaactcccactaacgtagaacccagagatcgctgcgttcccgccccctcacccgcccgctctcgtcatcactgaggtggagaagagcatgcgtgaggctccggtgcccgtcagtgggcagagcgcacatcgcccacagtccccgagaagttggggggaggggtcggcaattgaaccggtgcctagagaaggtggcgcggggtaaactgggaaagtgatgtcgtgtactggctccgcctttttcccgagggtgggggagaaccgtatataagtgcagtagtcgccgtgaacgttctttttcgcaacgggtttgccgccagaacacaggtaagtgccgtgtgtggttcccgcgggcctggcctctttacgggttatggcccttgcgtgccttgaattacttccacgcccctggctgcagtacgtgattcttgatcccgagcttcgggttggaagtgggtgggagagttcgaggccttgcgcttaaggagccccttcgcctcgtgcttgagttgaggcctggcctgggcgctggggccgccgcgtgcgaatctggtggcaccttcgcgcctgtctcgctgctttcgataagtctctagccatttaaaatttttgatgacctgctgcgacgctttttttctggcaagatagtcttgtaaatgcgggccaagatctgcacactggtatttcggtttttggggccgcgggcggcgacggggcccgtgcgtcccagcgcacatgttcggcgaggcggggcctgcgagcgcggccaccgagaatcggacgggggtagtctcaagctggccggcctgctctggtgcctggcctcgcgccgccgtgtatcgccccgccctgggcggcaaggctggcccggtcggcaccagttgcgtgagcggaaagatggccgcttcccggccctgctgcagggagctcaaaatggaggacgcggcgctcgggagagcgggcgggtgagtcacccacacaaaggaaaagggcctttccgtcctcagccgtcgcttcatgtgactccacggagtaccgggcgccgtccaggcacctcgattagttctcgagcttttggagtacgtcgtctttaggttggggggaggggttttatgcgatggagtttccccacactgagtgggtggagactgaagttaggccagcttggcacttgatgtaattctccttggaatttgccctttttgagtttggatcttggttcattctcaagcctcagacagtggttcaaagtttttttcttccatttcaggtgtcgtgaaaactacccctaaaagccaaaatgggaaaggaaaagactcatatcaacattgtcgtcattggacacgtagattcgggcaagtccaccactactggccatctgatctataaatgcggtggcatcgacaaaagaaccattgaaaaatttgagaaggaggctgctgaggtatgtttaataccagaaagggaaagatcaactaaaatgagttttaccagcagaatcattaggtgatttccccagaactagtgagtggtttagatctgaatgctaatagttaagaccttacttatgaaataattttgcttttggtgacttctgtaatcgtattgctagtgagtagatttggatgttaatagttaagatcctacttataaaagtttgatttttggttgcttctgtaacccaaagtgaccaaaatcactttggacttggagttgtaaagtggaaactgccaattaagggctggggacaaggaaattgaagctggagtttgtgttttagtaaccaagtaacgactcttaatccttacagatgggaaagggctccttcaagtatgcctgggtcttggataaactgaaagctgagcgtgaacgtggtatcaccattgatatctccttgtggaaatttgagaccagcaagtactatgtgactatcattgatgccccaggacacagagactttatcaaaaacatgattacagggacatctcaggttgggattaataattctaggtttctttatcccaaaaggcttgctttgtacactggttttgtcatttggagagttgacagggatatgtctttgctttctttaaaggctgactgtgctgtcctgattgttgctgctggtgttggtgaatttgaagctggtatctccaagaatgggcagacccgagagcatgcccttctggcttacacactgggtgtgaaacaactaattgtcggtgttaacaaaatggattccactgagccaccctacagccagaagagatatgaggaaattgttaaggaagtcagcacttacattaagaaaattggctacaaccccgacacagtagcatttgtgccaatttctggttggaatggtgacaacatgctggagccaagtgctaacgtaagtggctttcaagaccattgttaaaaagctctgggaatggcgatttcatgcttacacaaattggcatgcttgtgtttcagatgccttggttcaagggatggaaagtcacccgtaaggatggcaatgccagtggaaccacgctgcttgaggctctggactgcatcctaccaccaactcgtccaactgacaagcccttgcgcctgcctctccaggatgtctacaaaattggtggtaagttggctgtaaacaaagttgaatttgagttgatagagtactgtctgccttcataggtatttagtatgctgtaaatatttttaggtattggtactgttcctgttggccgagtggagactggtgttctcaaacccggtatggtggtcacctttgctccagtcaacgttacaacggaagtaaaatctgtcgaaatgcaccatgaagctttgagtgaagctcttcctggggacaatgtgggcttcaatgtcaagaatgtgtctgtcaaggatgttcgtcgtggcaacgttgctggtgacagcaaaaatgacccaccaatggaagcagctggcttcactgctcaggtaacaatttaaagtaacattaacttattgcagaggctaaagtcatttgagactttggatttgcactgaatgcaaatcttttttccaaggtgattatcctgaaccatccaggccaaataagcgccggctatgcccctgtattggattgccacacggctcacattgcatgcaagtttgctgagctgaaggaaaagattgatcgccgttctggtaaaaagctggaagatggccctaaattcttgaagtctggtgatgctgccattgttgatatggttcctggcaagcccatgtgtgttgagagcttctcagactatccacctttgggtaaggatgactacttaaatgtaaaaaagttgtgttaaagatgaaaaatacaactgaacagtactttgggtaataattaactttttttttaataggtcgctttgctgttcgtgatatgagacagacagttgcggtgggtgtcatcaaagcagtggacaagaaggctgctggagctggcaaggtcaccaagtctgcccagaaagctcagaaggctaaatgaatattatccctaatacctgccaccccactcttaatcagtggtggaagaacggtctcagaactgtttgtttcaattggccatttaagtttagtagtaaaagactggttaatgataacaatgcatcgtaaaaccttcagaaggaaaggagaatgttttgtggaccactttggttttcttttttgcgtgtggcagttttaagttattagtttttaaaatcagtactttttaatggaaacaacttgaccaaaaatttgtcacagaattttgagacccattaaaaaagttaaatgagaaacctgtgtgttcctttggtcaacaccgagacatttaggtgaaagacatctaattctggttttacgaatctggaaacttcttgaaaatgtaattcttgagttaacacttctgggtggagaatagggttgttttccccccacataattggaaggggaaggaatatcatttaaagctatgggagggtttctttgattacaacactggagagaaatgcagcatgttgctgattgcctgtcactaaaacaggccaaaaactgagtccttgggttgcatagaaagcttcatgttgctaaaccaatgttaagtgaatctttggaaacaaaatgtttccaaattactgggatgtgcatgttgaaacgtgggttaaaatgactgggcagtgaaagttgactatttgccatgacataagaaataagtgtagtggctagtgtacaccctatgagtggaagggtccattttgaagtcagtggagtaagctttatgccattttgatggtttcacaagttctattgagtgctattcagaataggaacaaggttctaatagaaaaagatggcaatttgaagtagctataaaattagactaattacattgcttttctccgac

SEQ ID NO: 7509 - DNA, 281 bp, Homo sapiens; identical to SEQ ID NO: 5829
  misc_feature (1)..(281): n=a,t,g or c

SEQ ID NO: 7510 - DNA, 297 bp, Homo sapiens
  misc_feature (1)..(297): n=a,t,g or c
cggttcagtctaatcctttttgtagtcactcataggccagacttagggctaggatgatgattaataagagggatgacataactattagtggcaggttagttgtttgtagggctcatggtaggggtaaaaggagggcaatttctagatcaaataataagaaggtaatagctactaagaagaattttatggagaaagggacgcgggcgcgcgatatagggtcgaagccgcactcgtaaggggctggaatttttctatgtangccgttgagttngtggtagtcaaaactgtaataactta

SEQ ID NO: 7511 - DNA, 374 bp, Homo sapiens
aataaagacatgggtactttattttcaaaacactcatatgttgcaaaaaacacatagaaaaataaagtttggtgggggtgctgactaaacttcaagtcacagacttttatgtgacagattggagcagggtttgttatgcatgtagagaacccaaactaatttattaaacaggatagaaacaggctgtctgggtgaaatggttctgagaaccatccaattcacctgtcagatgctgatagactagctcttcagatgtttttctaccagttcagagatgggttaatgactagttccaatggggaaaaagcaagatggattcacaaaccaagtaattttaaacaaagacactttttttttttttgcaacacaatata

SEQ ID NO: 7512 - DNA, 494 bp, Homo sapiens
tttttttttttttttttttatgtgttgtcgtgcaggtagaggcttactagaagtgtgaaaacgtaggcttggattaaggcgacacgagtttctaggatagtcagtagaattagaattgtgaagatgataagtgtagagggaaggttaatggttgatattgctagggtggcgcttccaattaggtgcatgagtaggtggcctgcagtaatgttagcggttaggcgtacggctagggctattggttgaatgagtaggctgatggtttcgataataactagtatggggataaggggtgtaggtgtgccttgtggtaagaagtgggctagggcatttttaatcttagagcgaaagctcataatcactgcgcccgctcataaggggatggcccaggctaggtttatagataattgggtggttggtgtaaatgagttaagcaggagtcccaggaggttagttgtggcaattaaaatgattaaagatactagtataagaga

SEQ ID NO: 7513 - DNA, 656 bp, Homo sapiens
tttttttttttttttttttctttttaggtttgagggggaatgctggagattgtaatgggtatggagacatatcatataagtaatgctagggtgagtggtaggaagttttttcataggaggtgtatgagttggtcgtagcggaatcgggggtatgctgttcgaattcataagaacagggaggttagaagtagggtcttggtgacaaaatatgttgtgtagagttcaggggagagtgcgtcatatgttgttcctaggaagattgtagtggtgagggtgtttattataataatgtttgtgtattcggctatgaagaatagggcgaaggggcctgcggcgtattcgatgttgaagcctgagactagttcggactccccttcggcaaaagtcaagggggttccggtttgggccctgctaattgtggagaataatcctatttatggcccaagggtcctatgggcaaggggtaatcaaaggggttcctggggtgggaataagggtgaaaagtttaagggggcccctattaagaattgtgtaaattgaatgtaagccaaggggacctcctaaggaattgttttggccaaacgtccccatggcccgattaagggccaatttaagttttaagctcaacctgattcgaaggtttggtaaacggcaag

SEQ ID NO: 7514 - DNA, 127 bp, Homo sapiens
ttttttttttttatagaaaaaatatacactttattttcaactagaaaggtgcaaacatgtgaacttttggtacacactcctccaaacaaattaaaactgtcccgcaaaaaagcaggtcataattcaa

SEQ ID NO: 7515 - DNA, 368 bp, Homo sapiens; identical to SEQ ID NO: 762
  misc_feature (1)..(368): n=a,t,g or c

SEQ ID NO: 7516 - DNA, 5471 bp, Homo sapiens
caggacacgaggaaactgttaatgacttgggctttggaagtagctgttgtaatgaagaagtccgaaacatatgcacctttattctgtcttccgtctttccataaattttgcaaaggccttttagccgacactctcgttgaagatgtgaatatctgtctgcaggcatgcagcagtctacatgctctatcctcttccttgccagatgatcttttacagagatgtgttgatgtttgccgtgtccaactagtgcaccgtggaacttgtattcgacaagcatttggaaaactgttgaaatcaattcctttaggtgttttcctaagcgataacaatcacacagaaattcaagaaatttctttagcattaagaagtcacatgagtaaagcaccaagtaatacattccacccccaagatttctctgatgttattagttttattttgtatgggaactctcatagaacagggaaggacaattggttggaaagactgttctatagctgccagagactggataagcgtgaccagtcaacaattccacgcaatctcctgaagacagatgctatcctttggcagtgggccatatgggaagctgcacaattcactgttctttctaagctgagaaccccactgggcagagctcaagacaccttccagacaattgaaggtatcattcgaagtctcgcaggtcacacattaaaccctgatcaggatgttagtcagtggacaactgcagacagtgatgaaggccatggtaacaaccaacttagacttgttcttcttctgcagtatctggaaaatctggagaaattaatgtataatgcatacgagggatgtgctaatgccttaacttcacctcccaaggtcattagaacttttttgtataccaatcgccaaacttgtcaggactggctaacgcggattcgactctccatcatgagggtaggattgttggcaggccagcctgcagtgacagtgagacatggctttgacttgcttacagagatgaaaacaaccagcctatctcaggggaatgaattggaagtaagcattatgatggtggtagaagcactatgtgaacttcattgtcctgaagctatacagggaattgctgtctggtcatcatctattgttggaaaacatcttctgtggattaactcagtggctcaacaggctgaagggaggtttgaaaaggcctctgtggagtaccaggaacacctgtgtgccatgacaggtgttgattgctgcatctccagctttgacaaatcggtgctcaccttagccagtgctgggtgtaagagtgccagcctgaaacattgtctgaatggtgaatccagaaaaagtgtgctgtccaaaccgactgactcttcccctgaggttataaattatttaggaaacaaagcatgtgagtgctacatctcaactgccgattgggctgctgtgcaggaatggcagaacgctatccatgacttgaaaaagagtaccagtagcacttccctcaacctgaaagctgacttcaactatataaaatcattaagcagctttgagtctggaaaatttgtcgaatgtaccgagcaattagaattgttaccaggagaaaatatcaatctacttgctggaggatcaaaagaaaaaatagacatgaaaaaactgcttcgtaacatgtgaagtccagatccaagggaacctcagaaatccattgaagttccattgttaagaagttctgtttgtttggcaactgctttaaacccgatagaacaagatcagaagtggcagtctataactgaaaatgtggtaaagtacttgaagcaaacatcccgcatcgctattggacctctgagactttctactttaacagtttcacagtctttgccagttctaagtaccttgcagctgtattgctcgtctgctttggagaccacagtttctaacagactttcaacagaggactgtcttattccactcttcggcgaagctttacgttcatgtaaacagcatgacgtgaggccgtggatgcaggcattaaggtatactgtgtaccagaatcagttgttggagaaaattaaaggtatgatctcgtgaaatcttgagagaaactgaatgacgaatgaaactattgttcctgtttcacacagaagaaaactgaggttggcactcatcatgagcccctgttctcattctgcaaatggtgaagctctctattgtcctgaccccacagttcctgtcccatgaccagggccagctcaccaaggagctgcagcagcatgtaaagtcagtgacatgcccatgcgagtacctgaggaaggttatcaatactctggctgaccatcatcatcgtgggactgactttggtggaagtccttggttacatgtcattattgcgtttccgacaagttataaagttgtcattaccctctggatagtttacctttgggtgtctctcctgaagactatcttctggtctcgaaatggacatgatggatccacggatgtacagcagagagcctggaggtccaaccgccgtagacaggaagggctgaggtccatttgtatgcacacaaagaaaagagtttcttcctttcgaggaaataaaattggcctgaaagacgtcattactctacggagacatgtggaaacaaaagttagagctaaaatccgtaagaggaaggtgacaacgaaaatcaaccatcatgacaaaatcaatggaaagaggaagaccgccagaaaacagaaaatgtttcaacgtgcgcaagagttgcggcggcgagcagaggactaccacaaatgcaaaatcccccttctgcaagaaaggctctttgcaactgggtcagaatggcggcagcggagcatcgtcattcttcaggattgccctactggccctacctcacagctgaaactttaaaaaacaggatgggccaccagccacctcctccaactcaacaacattctataactgataactccctgagcctcaagacacctcccgagtgtctgctcactccccttccaccctcagcggatgataatctcaagacacctcccgagtgtgtgctcactccccttccaccctcagcggatgataatctcaagacacctcccgagtgtgtgctcactccccttccaccctcagcggatgataatctcaagacacctcctgagtgtctcctcactccccttccaccctcagcggatgataatctcaagacacctcccgagtgtctgctcactccccttccaccctcagctctaccctcagctccaccctcagcagatgataatctcaagacacgtgccgagtgtctgctccatccccttccaccctcagcggatgataatctcaagacaccttccgagcgtcagctcactccccttccaccctcagctccaccctcagcagatgataatatcaagacacctgccgagcgtctgcgggggccgcttccaccctcagcggatgataatctcaagacaccttccgagcgtcagctcactccccttccaccctcagctccaccctcagcagatgataatatcaagacacctgccgagcgtctgcgggggccgcttccaccctcagcggatgataatctcaagacaccttccgagcgtcagctcactccccttccaccctcagctccaccctcagcagatgataatatcaagacacctgccgagcgtctgcgggggccgcttccaccctcagcggatgataatctcaagacaccttccgagcgtcagctcactccccttccaccctcagctccaccctcagcagatgataatatcaagacacctgccgagcgtctgcgggggccgcttccaccctcagcggatgataatctcaagacaccttccgagcgtcagctcactccccttccaccctcagctccaccctcagcagatgataacatcaagacacctgccttccaccctcagcggatgataatctcaagacaccttccgagcgtcagctcactccccttccaccctcagctccaccctcagcagatgataatatcaagatacctgctgagcgtctgcggattccgcttccaccatcagccgatgataatctcaagacaccttccgagcgtcagctcactccccttccaccctcagctccaccctcagcagatgataatatcaagacacctgccgagcgtctgcgggggccgcttccaccctcagcggatgataatctcaagacaccttccgagcatcagctcactccccttccaccctcagctccaccctcagcagatgataatatcaagacacctgccgagcgtctgcgggggccgcttccaccctcagcggatgataatctcaagacaccttccgagcgtcagctcactccccttccaccctcagctccaccctcagcagatgataatatcaagacacctgccgagcgtctgcgggggccgcttccaccctcagcggatgataatctcaagacaccttccgagcgtcagctcactccccttccacactcagctccaccctcagcagatgataatatcaagacacctgccgagcgtctgcggggagcgtctgcgggggccgcttccaccctcagcggatgataatctcaagacaccttccgagcgtcagctcactccccttccaccctcagctccaccctcagcagatgataatatcaagacacctgctgagcgtctgcgggggccgcttccaccctcagcggatgataatctcaagacaccttccgagcgtcagctcactccccttccaccctcagctccaccctcagcagatgataatatcaagacacctgccgagcgtctgcgggggccgcttccaccctcagcggatgataatctcaagacaccttccgagcgtcagctcactccccttccaccctcagctccaccctcagcagatgataatatcaagacacctgccgagcgtctgcgggggccgcttccaccctcagccgatgataatctcaagacacctcccttagctactcaggaggctgaggcagaaaaaccacgcaaacccaagaggcagagggcggctgagatggaaccacctcccgaacccaagaggcggagggtcggtgacgtggaaccgtcacgcaaacccaagaggcggagggccgctgacgtggaaccatcatcacccgaacccaagaggcggagggtcggtgatgtggaaccgtcacgcaaacccaagaggcggagggccgctgacgtggaaccatcatcacccgaacccaagaggcggagggtcggtgacgtggaaccgtcacgcaaacccaagaggcggagggccgctgacgtggaaccatcattacccgaacccaagaggcggaggttgagctgagaagaggccagtgcactcaagcctgagcaataagaataaaaccgagtagaacaaaataaaaaattcaaaaaacaaaacaaaacccacactccaaaaactaacaaagaataaataaataatataaaaat

SEQ ID NO: 7517 - DNA, 315 bp, Homo sapiens; identical to SEQ ID NO: 2937

SEQ ID NO: 7518 - DNA, 349 bp, Homo sapiens
agcgagatgacgaagggaacgtcatcgtttggaaagcgtcgcaataagacgcacacgttgtgccgccgctgtggctctaaggcctaccaccttcagaagtcgacctgtggcaaatgtggctaccctgccaagcgcaagagaaagtataactggagtgccaaggctaaaagacgaaataccaccggaactggtcgaatgaggcacctaaaaattgtataccgcagattcaggcatggattccgtgaaggaacaacacctaaacccaagagggcagctgttgcagcatccagttcatcttaagaatgtcaacgattagtcatgcaataaatgttctggttttaaaaaatac

SEQ ID NO: 7519 - DNA, 484 bp, Homo sapiens
gtatacattttacatgtattcaggagtgggatgtacatcagtctctcttttttttttttttattgatcattcttgggtgtttctcgcagaggggatttggcagggtcataggacaatagtggagggaaggtcagcagataaacaagtgaacaaaggtctctggttttcctaggcagaggaccctgcggccttccgcagtgtttgtgtccctgggtacttgagattagggagtggtgatgactcctaacgagcgtgctgccttcaagcatctgtttaacaaagcacatcttgcaccgcccttaatccattcaaccctgagtggacacagcacatgtttcagagagcacagggttgggggtaaggtcatagatcaacaggatcccaaggcagaagaatttttcttagtacagaacaaaatgaaaagtctcccatgtctacttctttctacacagacacggcaaccatccgatttctcaatcttttc

SEQ ID NO: 7520 - DNA, 1083 bp, Homo sapiens; identical to SEQ ID NO: 723

SEQ ID NO: 7521 - DNA, 469 bp, Homo sapiens; identical to SEQ ID NO: 5729

SEQ ID NO: 7522 - DNA, 345 bp, Homo sapiens
  misc_feature (1)..(345): n=a,t,g or c
nagtntaagttatttatttaagncattctccttgccacaagcaaagngatgnganaccagtataccagtcatcattttgatacaagtaaagnaggtgagcttaaggtcccatatactttttctggtccatgtgcanagtaacggtccaaaccagtgctgtggtccctggtgcccgggtagtggtccagattctctttattcatcttcgtagccagttggaagtggattcacatgagggttatggaatagagtatggttaccatcntccccagggaaacggcttgggtcctgatgcggagattgggggtaggnngatgaactcgggtctctcgtngcgctccgtgg

SEQ ID NO: 7523 - DNA, 684 bp, Homo sapiens
cctttttgtcccagttgtcattattttcgaattcctaaaaaagctgaaggtgtcggagctgaaagaggagctcaagaagcgacgcctttctgacaagggtctcaaggccgagctcatggagcgactccaggctgcgctggacgacgaggaggccgggggccgccccgccatggagcccgggaacggcagcctagacctgggcggggattccgctgggcgctcgggagcaggcctcgagcaggaggccgcggccggcggcgatgaagaggaggaggaagaggaagaggaggaggaaggaatctccgctctggacggcgaccagatggagctaggagaggagaacggggccgcgggggcggccgactcgggcccgatggaggaggaggaggccgcctcggaagacgagaacggcgacgatcagggtttccaggaaggggaagatgagctcggggacgaagaggaaggcgcgggcgacgagaacgggcacggggagcagcagcctcaaccgccggcgacgcagcagcaacagccccaacagcagcgcggggccgccaaggaggccgcggggaagagcagcggccccacctcgctgttcgcggtgacggtggcgtgaagcctgtgaaagtttcagctccccgagttggtggaaaacgctaaactggcagattagatttttaaataaag

SEQ ID NO: 7524 - DNA, 4029 bp, Homo sapiens
gtcgggggcgggacaggacaccctgcccaccggaggggcgcgccaccgccgcccccgctccactccgccagggggcgctgtgtggctcccgagtaggctcagagcgaccgtggccgggcggaagcggctttctggcctaagctttaacaggcttcgcctgtgcttcctgtttcctcttttaccaaggacccgccaacatggtaggtgttttggctcgaggccgccatcctccacaatcgtcccccatctgcagcttcccgcggtcctcagcccacagagaggccctgggccggaaggcgcagagccctgtcaggctggagcgcaacgggccggcggcttccgcattaagcccggcgcccggcactgtttagccgggccctctccggctcagcgcagccggcggtccccaaccacaccggccggggctcggcgccgcactcttcccagaaggttgcgctggctcgtgagtgatcctgtcctctccacccgcagggccgcgttcgcaccaaaaccgtgaagaaggcggcccgggtcatcatagaaaagtactacacgcgcctgggcaacgacttccacacgaacaagcgcgtgtgcgaggagatcgccattatccccagcaaaaagctccgcaacaagatagcagggtgagtcgggccttcctcggcctccgggcgtccgcgatctgtttgtgtgctctgccgccctccgactcgggaagagacggtgccttggtggtttcgttagcctgagactccctggtgtcccggagaagggctagagctctgcgtgtgcaggatttctgttgtgaacttaggcctgtgtcatgactggccgcggtgaccctgggtcgaaggtagccaccgtcagacctcttgctttgaagctacgttgcttttagttgtcaacttttttctttcttttttttcttttttttttgagacggaatcttgccctggcgcccaggctagagtgcagtggcgccatctcggctcactgcaacctccgtctcccgggttcaacgcgattgtcatgcctcagccttcccagtagctgggattagaggcacgtgctaccacactcggctaatttttgtatttttagtagacaacagggtttcacaatgttgaccaggctggtctcgaacacctgacctcaagcgatccgcccgcctcggcctcccaaattgctgggattacaggcgtgagcacctcgcccggctggatgtcaacttctaatgcttacttcacagttgcagttactgttcgagagatttataggcatatggcctggaagaatagtgccaaagtcaacgtattaattgccaagttatgtgaatttgaaattggaagaaaatgaaggctgtgaagggtcgtgaaactgcggggcggggcggggcgagtggggggtggggcgcttgatcatcatgaaggagagtttgaatagagagtgagaaagccaaggggaaggaatgctcaggccagtggaggttctatgtgtaggaggtcccaggatagtgagtcctcttccttctcactgtggaaaagaactaaagcgggtatttatatatccacatgtgctcagtaccaggtgggagttgatttgtcttctcactgttctctttggctgtgtgtgctttgtagttatgtcacgcatctgatgaagcgaattcagagaggcccagtaagaggtatctccatcaagctgcaggaggaggagagagaaaggagagacaattatgttcctgaggtaaactttctggatatttgggcttctggctaatcctcaaatgataaagctatgggttcttggcttccaaagggacctcagctgaatctgagacctttaatccatacattccataaccagctgtgggtgcccataggccccctaccagtttcttagcctccattctgctcttctggaaccagttaagtctattccatatttcatgagagcccttaatgttgatttgatgactgctgtcgtggctcgattgtttgcccctaatatagtattctttggtgtaaacacagacttcaagtgttctgaatactgaatgagggcatgggaaggtaaggccagaagaacaggtcatcggggtctgtaatactgtaagagactgctcaccttgtgagaggaatgctatccttgtgcagctcctcttccccatatttaagaacctggggagaggaggaggagaggtgagtgataatctcattgattggtattttgaccctacctcgtttccttgtaggtctcagccttggatcaggagattattgaagtagatcctgacactaaggaaatgctgaagcttttggtaagtgtttgctggattcctaaagtggtattttcctggtcaaaaaccatcagtaggtcttattatccaaggtcacccagctagtaagtggcagagttgggaatcccatctaaacttgtagccactaaactggactgctttcataaggggtgtagcggaagttgtgtgcattgagttagttcgccacaagatcatgattcccaaatctagtgcttccaggacacttttctctcttggctgcttctgttcttggtttatagctggcttacgttgccccctttgtgtcagccctggctgaatctgcctgcttttcttctgtgaaggcattcctttggtgtctccatgctaaccactcagaaatgagctttggtccatttccaggtacatacaaggcactacttaggtagttcacgagtatcttcattgcactttgatgttttttctatggcttatcttagtccttttgcatacttgggtgaaagcatgggcttcatgggcggttggtgattttgaacaacttcatttttcctatttttatggtcattaaatgtttaagacactcaaaaaggtagtagcaaaatgaactcacatgtactttcccagctacagccccgctgtgggtcttttcttcctgaaataaccactgcgctgaatgcagcatttttgttgaaactaaaatgggtttctgaggaccaaataggacatggagttccaggtataagttgggcccttggcttcttgccctgcctaccagcctgaacttgtttgagggcagggtctgctcttgcctccctcccttctgcttgatgccttgtgtacttgggcccttcacaaatgttgattagattagtaatagctcttacccagggctggtcctggaaagcaagtggcactgtgtattctcaaagggacagagttttgctttagaggacatttggcaatgtccagacacatttttcgttctcatagccaggggatacctgctaacttctaatgggtagaggccaaggatgttgctaaactttctgcaatacacagtacagctgcctataacaaagaatgtccagcccaggatgtctacgttgccaagattgagaaacggtgttttagagtgattgataggaaggggttgtgaaaacagatacaaatggcatggtacattgggtaaaagtcatagagttgtaaatggggataccacatggtcaggtgtgtgttgaaggaagatcactctggaaaacgtgggaggcattgagaaccctgttggctcttaaagggtccttcaggtcgcctctggacccccttgagagtgctgtggctctaggggcctgtgttttcttctggggtccactcacagatctcaccagtaactgctcactgaatccattttctcgttccaggacttcggcagtctgtccaaccttcaggtcactcagcctacagttgggatgaatttcaaaacgcctcggggacctgtttgaattttttctgtagtgctgtattattttcaataaatctgggacaacagccttgcctgtgtcatctttgcagttgtgtgtgggtagaggaaaggcaggagctctcgaggcaacagatcagctggcacttgtctgggattcaggtgctgctgcatctggtttatggggagtgggttcaccagagtttagtaaaggagcaagggcaagcctgaacgtgttgagagtggtctgcag

SEQ ID NO: 7525 - DNA, 329 bp, Homo sapiens
cgacctacgcacacgagaacatgcctctcgcaaaggatctccttcatccctctccagaagaggagaagaggaaacacaagaagaaacgcctggtgcagagccccaattcctacttcatggatgtgaaatgcccaggatgctataaaatcaccacggtctttagccatgcacaaacggtagttttgtgtgttggctgctccactgtcctctgccagcctacaggaggaaaagcaaggcttacagaaggatgttccttcaggaggaagcagcactaaaagcactctgagtcaagatgagtgggaaaccatctcaacaaacacattttggat

SEQ ID NO: 7526 - DNA, 418 bp, Homo sapiens
tttttttttttttttttttttttttttttttttttttttttttctggctccaaagatcctttactgagatccacttgaaacacttcggtccttaacttgttaactgagttgacaggctgatggctgatctaggtaaaggtttcacggtagcaaaaacacttcctgcctataatacatcaaaacaggttcctgaatgtgtgtgaatatcatcaaggtctctgtcccatcttcttcagggttcgattaagctcctcaaatttgtggatctgacggatgaagaaatccccataacgcctggcgaccttggtgtccgcgatgtggatcatgtccttatcaatgtagaagtcaacctctgaggctgactgaaattcaccatccagggctgagataccgctggtccacacgaggttcttcatct

SEQ ID NO: 7527 - DNA, 410 bp, Homo sapiens
tttttttttttttttttttttacaaagaatcaactttattgaacattcagggtcagtttctcttcttgctcttgcctgtgaccttggctggtgtgaggactggagctgctgcctggtacagggtggaggagatcttgttgatgtagtacagaccaaccatggagaagatgaagcaggtggtgacacagactcggtggatgaggccagatgcaaagagagccaacaggaggcacaggagaatctcagggaagatctttgcttggaatcctttgccaaagacaagattctccagattattgaaggcagtgagcgagaacacgaagagacccgaaccaagcaggccgccctggatggtgagccactcggtggaggccagctgacggctgtacatctgcatcccagcaaagagc

SEQ ID NO: 7528 - DNA, 519 bp, Homo sapiens; identical to SEQ ID NO: 539
  misc_feature (1)..(519): n=a,t,g or c

SEQ ID NO: 7529 - DNA, 326 bp, Homo sapiens
  misc_feature (1)..(326): n=a,t,g or c
aactttytaaactttttatttgcatabtaaaaaahtybtgcattccaataattaanvatcatttgaacaaaaaaaaaaaatggcacbctgattaaactgcattacagcctgcaggacaccbtgggccagcttggttttactctagatttcactgtcgtcccaccccacttcttccaccccacttcttccttcaccaacatgcaagttbtttccttncctgccagccagatagatagacagatgggaaaggcaggcgcggccttcgttgtcagtagttctttgatgtgaaagggmagcacagycatttaacttgghcccacctcttt

SEQ ID NO: 7530 - DNA, 384 bp, Homo sapiens
tttcgggaacaataacatgagagtttattatcacatgactactcaggaggggacatgaagcggcagcgatggggaaggggtgtaaggaatgggcaagtgctgctggagcagggctgtggcacggtcatggggccaggataactggggctgttgaagagcctcttttcctcagtctggttcttcttccagcagtcagatgcagggacgcccggtgcagaagcacaaggcactaataatcaggagaggcatggctagattccactcacttccaacatttccttctggtctcttttccctttggttgggaacattctccagcagtacagccacagaggggtcagagattccagaagcagcagaatccagacacccaagagcatggcc

SEQ ID NO: 7531 - DNA, 987 bp, Homo sapiens
gagcagcggacgccggtctctgttccgcagatggggtttgttaaagttgttaagaataaggcctactttaagagataccaagtgaaatttagaagacgacgagagggtaaaactgattattatgctcggaaacgcttggtgatacaagataaaaataaatacaacacacccaaatacaggatgatagttcgtgtgacaaacagagatatcatttgtcagattgcttatgcccgtatagagggggatatgatagtctgcgcacgttatgcacacgaactgccaaaatatggtgtgaaggttggcctgacaaattatgctgcagcatattgtactggcctgctgctggcccgcaggcttctcaataggtttggcatggacaagatctatgaaggccaagtggaggtgactggtgatgaatacaatgtggaaagcattgatggtcagccaggtgccttcacctgctatttggatgcaggccttgccagaactaccactggcaataaagtttttggtgccctgaagggagctgtggatggaggcttgtctatccctcacagtaccaaacgattccctggttatgattctgaaagcaaggaatttaatgcagaagtacatcggaagcacatcatgggccagaatgttgcagattacatgcgctacttaatggaagaagatgaagatgcttacaagaaacagttctctcaatacataaagaacagcgtaactccagacatgatggaggagatgtataagaaagctcatgctgctatacgagagaatccagtctatgaaaagaagcccaagaaagaagttaaaaagaagaggtggaaccgtcccaaaatgtcccttgctcagaagaaggatcgggtagctcaaaagaaggcaagcttcctcagagctcaggagcgggctgctgagagctaaacccagcaattttctatgattttttcagatatagataataaacttatgaacagcaactaaaaa

SEQ ID NO: 7532 - DNA, 404 bp, Homo sapiens
actttyccaatagtttwatttgtatttttctttaaatatccttttctggaatttttcagaaacaaaacataaaaaaattatatactttattacaaatkggaaactcagagtgctccaaatctcttatttacaaacaacactgggcaggatacccaaacaaacaaacaagaaatwcttacaaaggcatgaagctgtttattgacagtaatcagctttcatcaaattaaaaaatatatatwtbtwcatacacagttaacgaggcaggccagaaagagttyatctgtaggctcagcctcgctctcacctcgtgccgaattcctkcagcccgggggayccactagttctagagcggccgccaccgcggtggagctccagctttttttccytttagtgaggggtaattg

SEQ ID NO: 7533 - DNA, 1330 bp, Homo sapiens; identical to SEQ ID NO: 811

SEQ ID NO: 7534 - DNA, 414 bp, Homo sapiens
  misc_feature (1)..(414): n=a,t,g or c
gctgggactgccccaaaggcnaaacnnggtttattgggcagcagctgggaaaatcagcggttggacttggccacacgctccagctcgtccttcttcttaatggcataggagttcgaggagcccttggcagccattgatgngctcatctgccaggcactcagcaatggtcttaatgttccggaaggcagcctcangagcgcctgtgcacagcagccagatggcctggttcanacggcgcaggggggacacatccacagcctgncgtctcacagncccggngcgcccaatgcgngtggagtcctcccggggaccactgttgatgatggngtnnaccaggacctgcanagggttcnngcctgngagnaggtgtatgatctcgaaggcatgcttgacgaagcgcaaagtcaagagctt

SEQ ID NO: 7535 - DNA, 509 bp, Homo sapiens
  misc_feature (1)..(509): n=a,t,g or c
tttttttttttttaagtcacaggcgcatttattattgtctggaacatcaaggcctttcctcccctggcagtggcacaagggagggccaactctcagnaggcggccagtgccaccagcagcaggcccaatgggtgggcaggggtcnatgngcgggnaaaaanannncctnnagctngccgaaaagctggcgatntcaggatcctgggcttcgtaggacttgaccaagcgagcaaacttaaggacaccttccccgtcgcagctgaagccataggtttgataacctcctgctggatctgcgtggccacgggcagcacgaattgcagcatcttacccatgtcgttgcaggcgttatcccgagcctcgtccatgcgcactgcattctccggggcggaaaacgctggatcacctccgcgagaccacctttgcttgctcaacgctcaaggccgccggttggggngaagcggaccataaggggctgaaantctangttcnacggagggtaaatggga

SEQ ID NO: 7536 - DNA, 543 bp, Homo sapiens
caggcggccgggaagatggcggacattcagactgagcgtgcctaccaaaagcagccgaccatctttcaaaacaagaagagggtcctgctgggagaaactggcaaggagaagctcccgcggtactacaagaacatcggtctgggcttcaagacacccaaggaggctattgagggcacctacattgacaagaaatgccccttcactggtaatgtgtccattcgagggcggatcctctctggcgtggtgaccaagatgaagatgcagaggaccattgtcatccgccgagactatctgcactacatccgcaagtacaaccgcttcgagaagcgccacaagaacatgtctgtacacctgtccccctgcttcagggacgtccagatcggtgacatcgtcacagtgggcgagtgccggcctctgagcaagacagtgcgcttcaacgtgctcaaggtcaccaaggctgccggcaccaagaagcagttccagaagttctgaggctggacattcggcccgctcccacaatgaaataaagttattttctattcc

SEQ ID NO: 7537 - DNA, 371 bp, Homo sapiens
cagccatcgtggtgtgttcttgactccgctgctcgccatgtcttctcacaagactttcaggattaagcgattcctggccaagaaacaaaagcaaaatcgtcccattccccagtggattcggatgaaaactggaaataaaatcaggtacaactccaaaaggagacattggagaagaaccaagctgggtctataaggaattgcacatgagatggcacacatatttatgctgtctgaaggtcacgatcatgttaccatatcaagctgaaaatgtcaccactatctggagatttcgacgtgttttcctctctgaatctgttatgaacacgttggttggctggattcagtaataaatatgtaaggcctttcttttt

SEQ ID NO: 7538 - DNA, 376 bp, Homo sapiens; identical to SEQ ID NO: 5825

SEQ ID NO: 7539 - DNA, 288 bp, Homo sapiens
  misc_feature (1)..(288): n=a,t,g or c
gctttttaaatngctttattagctttaaatttyyccatgcaaatsggtgaactactgctgacagaaacttacactgrgtgcaaaggcaatctytcaaatagaagctggcaacacaagmcccacttgacacatggaaataacatagggttcacagcaaacggatcagtaaaggcatattaggraaatgcaaggaaaaagaaaacagcgggaatcacagtattaatctcatgataaatggcaggggtcaaggcataaggcaaawttcatcatgatggtcatggtgwttag

SEQ ID NO: 7540 - DNA, 265 bp, Homo sapiens
aacttgaaacacaaacgctttatttaaaggagcatctcagttacgtgtggcggacaaaaaaaaggagcagattgtgacagaccattcccatcggccaagtggtcaaccccgacatccaagacccagcgagcaccaagctcaggtacaccctccgggcttctcgctctgactccaaaagggtgagcacgtcgccctgcggcaagcgggcctatattacatatgcggatgataggattcggctcgtgtacgtccatgaagttccacg

SEQ ID NO: 7541 - DNA, 150 bp, Homo sapiens
tttatctttatttttttgagatggagtcttgcagttgtcgcccgagctggagtgcaatagcgcaatctcggctcacttcaacctccgcctcccaggttccagcacctctcctgcttcagcctcccaagtagctgagattacaggcgtccg

SEQ ID NO: 7542 - DNA, 316 bp, Homo sapiens
tttttttttttttttttttctttctacattttattatttcaaaccaggtgaacaattccataaaacatgtgaaaaaagcaaggaagtgttcaacgctgaaggccccgggctgtggacaagggcatgaggggcgtggccccaagcaggcagcggcggttcctaggttagcgctagggagctacattttaggttaatagagcctggggccagggccgctggggcagggcctccagtgacgttggcagttgtctggaacagcccttggaacccaattctgtggagggcagggcaggggtgccgctcgcacgggggcggc

SEQ ID NO: 7543 - DNA, 432 bp, Homo sapiens; identical to SEQ ID NO: 727
  misc_feature (1)..(432): n=a,t,g or c

SEQ ID NO: 7544 - DNA, 421 bp, Homo sapiens
gttggagccgctgccgtcgccatgacccgcggtaaccagcgtgagctcgcccgccagaagaatatgaaaaagcagagcgactcggttaagggaaagcgccgagatgacgggctttctgctgccgcccgcaagcagagggactcggagatcatgcagcagaagcagaaaaaggcaaacgagaagaaggaggaacccaagtagctttgtggcttcgtgtccaaccctcttgcccttcgcctgtgtgcctggagccagtcccaccacgctcgcgtttcctcctgtagtgctcacaggtcccagcaccgatggcattccctttgccctgagtctgcagcgggtcccttttgtgcttccttcccctcaggtagcctctcttccccttgggccactcccgggggtgagggggttaccctttcccagt

SEQ ID NO: 7545 - DNA, 357 bp, Homo sapiens
acctaggtcgcggcgacatggccaaacgtaccaagaaagtcgggatcgtcggtaaatacgggacccgctatggggcctccctccggaaaatggtgaagaaaattgaaatcagccagcacgccaagtacacttgctctttctgtggcaaaaccaagatgaagagacgagctgtggggatctggcactgtggttcctgcatgaagacagtggctggcggtgcctggacgtacaataccacttccgctgtcacggtaaagtccgccatcagaagactgaaggagttgaaagaccagtagacgctcctctactctttggagacatcactggcctataataaatgggttaatttatgtaaca

SEQ ID NO: 7546 - DNA, 341 bp, Homo sapiens
tttttttttttttttttttttaacagtgaaccatatttcaatttattgacattgtcaatttatgaacaagacaggattttttttttttcccatggaatgagatccttttcaatctgccataacatgtgcccacacatcttcaccttggaaatgtagcatttcaagctttagtcagggtagattattccttctttactttcacaatttttacgttgctgccagaagtcttctcagcatttgctttgaattctgtcttcagtgcatctctcactgcttttgcacagatctgggagtatcggatgtagctgagtccagcctgtctccagtaggccaccatgctg

SEQ ID NO: 7547 - DNA, 139 bp, Homo sapiens
tttttcaggcttccgggtctttaatggggcgggggctgggggcagttcatccagaggtggctccgaagctgaggtcaaccttggcggctggctcgctactccagggccttcaccagggcctcgttggctcgattcggat

SEQ ID NO: 7548 - DNA, 186 bp, Homo sapiens
  misc_feature (1)..(186): n=a,t,g or c
aaaatttaaaataaaattttattttatcttatactcaagttcagacaatagcatgtggtgtacattcaaaatttttgacaggtacagagcacattaaaaaatgaagacatgatcaaggagatgtaagagacaaatagacaacaacattctccctgaatctggaaaaaagcnagccnttagggtncc

SEQ ID NO: 7549 - DNA, 148 bp, Homo sapiens
caaagattcactttatttattcattctcctccaacattagcataattaaagccaagagggcgcatgggggtgaggtgaaagatgagctggaggaccgcaataggggtaggacacctgtcgaaaaagggtcagaggccaaaggatggga

SEQ ID NO: 7550 - DNA, 145831 bp, Homo sapiens; identical to SEQ ID NO: 646

SEQ ID NO: 7551 - DNA, 559 bp, Homo sapiens; identical to SEQ ID NO: 566
  misc_feature (1)..(559): n=a,t,g or c

SEQ ID NO: 7552 - DNA, 404 bp, Homo sapiens
  misc_feature (1)..(404): n=a,t,g or c
aggctttttattacattgttacaggcaatgcaattaccgtgagcctggacccgtgtacaatccccaagccacggcaaaacatcaggagaacgcaccgatctcacattntacacagcgcagaacaggntcaccccgantntcaacagaagaccaaaantcactttacaaaaaaaattaaaantaacacccttttttatatttaaaaaagtgccagcccttgagctgcagacattagagacgcccaaggacgtgccgccantgggaacgaggccgccagccacgtntcgcccgtcctggggctttaaagctggaactgaagcgttccagacantcatntctgggagttcctctgtcttaggggttttccctctctactgttggtaatgtgtnaggcattttcagcc

SEQ ID NO: 7553 - DNA, 429 bp, Homo sapiens
  misc_feature (1)..(429): n=a,t,g or c
tttaaggtgccgcatgttctttttagtttccatacatcgtctgtcccagagtgaggagaagttgatctccttcccacatccaccacaggctgcgtgagggaagcctggctccccacaacttgctccttctccagccctgcccctctcaattaaagcaatgctttcttttttcttttcttttttttgagacgganttngctctgtcacccgggctggagtgcagtggcgcgatcttggctcactgcaagctccgcctcctgggttcacaccattctccagcctcagcctcccaagctgctgggactacaggcgcccaccaccacgccaagctaattttttgtatttttttagtagagacagggtttcactgtgttagccaggatggtctcaatctcccaaccttgtgatccacccacctcggcctcccaa

SEQ ID NO: 7554 - DNA, 549 bp, Homo sapiens
cctctcttccacaggaggcctacacgccgccgcttgtgctgcagccatgtctctagtgatccctgaaaagttccagcatattttgcgagtactcaacaccaacattgatgggcggcggaaaatagcctttgccatcactgccattaagggtgtgggccgaagatatgctcatgtggtgttgaggaaagcagacattgacctcaccaagagggcgggagaactcactgaggatgaggtggaacgtgtgatcaccattatgcagaatccacgccagtacaagatcccagactggttcttgaacagacagaaggatgtaaaggatggaaaatacagccaggtcctagccaatggtctggacaacaagctccgtgaagacctggagcgactgaagaagattcgggcccatagagggctgcgtcacttctggggccttcgtgtccgaggccagcacaccaagaccactggccgccgtggccgcaccgtgggtgtgtccaagaagaaataagtctgtaggccttgtctgttaataaatagttatatacaaaaaaa

SEQ ID NO: 7555 - DNA, 299 bp, Homo sapiens; identical to SEQ ID NO: 589
  misc_feature (1)..(299): n=a,t,g or c

SEQ ID NO: 7556 - DNA, 268 bp, Homo sapiens
tttttacctcgttgcactgctgagagcaagatgggtcaccagcagctgtactggagccacccgcgaaaattcggccagggttctcgctcttgtcgtgtctgttcaaaccggcacggtctgatccggaaatatggcctcaatatgtgccgccagtgtttccgtcagtacgcgaaggatatcggtttcattaagttggactaaatgctcttccttcagaggattatccggggcatctactcaatgaaaaaccatgataattctttgtata

SEQ ID NO: 7557 - DNA, 297 bp, Homo sapiens; identical to SEQ ID NO: 5743

SEQ ID NO: 7558 - DNA, 697 bp, Homo sapiens
gaattccgggagcagtcaagatgtgtgacttcaccgaagaccagaccgcagatctgatcccaagcactgagttcaaggaggccttccagctgtttgaccgaacaggtgatggcaagatcctgtacagccagtgtggggatgtgatgagggccctgggccagaaccctaccaacgccgaggtgctcaaggtcctggggaaccccaagagtgatgagatgaatgtgaaggtgctggactttgagcactttctgcccatgctgcagagagtggccaagaacaaggaccagggcacctatgaggattatgtcgaaggacttcgggtgtttgacaaggaaggaaatggcaccgtcatgggtgctgaaatccggcatgttcttgtcacactgggtgagaagatgacagaggaagaagtagagatgctggtggcagggcatgaggacagcaatggttgtatcaactatgaagcgtttgtgaggcatatcctgtcggggtgacgggcccatggggcgagctcgtccgcatggtgctgaatggctgaggaccttcccagtctccccagagtccgtgcctttccctgtgtgaattttgtatctagcctaaagtttccctaggctttcttgtctcagcaactttcccatcttgtctctcttggatgatgtttgccgtcagcattcaccaaataaacttgctctctggg

SEQ ID NO: 7559 - DNA, 905 bp, Homo sapiens
caacacaggggcagtctccaggacctccacaccattaacaagatgagccttgtgctcccttgggctctagagaggaagcccctctgagccctcagcccctctttcctccctctcctaaagtaatttgatcctcaggaatttgttctgccctcatctggccctggccagctctgcatttgacaaatgccaggaagaggaaactgttgagaaaacggaactactggggaaagggagggctcactgagaaccatcccggtaacccgaccgccgctggtcaccatgaaccacattgtgcaaaccttctctcctgtcaacagcggccagcctcccaactacgagatgctcaaggaggagcaggaagtggctatgctgggggggccccacaaccctgctcccccgacgtccaccgtgatccacatccgcagcgagacctccgtgcctgaccatgtcgtctggtccctgttcaacaccctcttcatgaacacctgctgcctgggcttcatagcattcgcctactccgtgaagtctagggacaggaagatggttggcgacgtgaccggggcccaggcctatgcctccaccgccaagtgcctgaacatctgggccctgattttgggcatcttcatgaccattctgctcgtcatcatcccagtgttggtcgtccaggcccagcgatagatcaggaggcatcattgaggccaggagctctgcccgtgacctgtatcccacgtactctatcttccattcctcgccctgcccccagaggccaggagctctgcccttgacctgtattccacttactccaccttccattcctcgccctgtccccacagccgagtcctgcatcagccctttatcctcacacgcttttctacaatggcattcaataaagtgtatatgtttct

SEQ ID NO: 7560 - DNA, 343 bp, Homo sapiens
cgcgcggtgtggtggcagcaggcgcaccaagcctcgaaatgcagaacgacgccggcgagttcgtggacctgtacgtgccgcggaaatgctccgctagcaatcgcatcatcggtgccaaggaccacgcatccatccagatgaacgtggccgaggttgacaaggtcacaggcaggtttaatggccagtttaaaacttatgctatctgcggggccattcgtaggatgggtgagtcagatgattccattctccgattggccaaggccgatggcatcgtctcaaagaacttttgactggagagaatcacagatgtggaatatttgtcataaataaataatgaaaacct

SEQ ID NO: 7561 - DNA, 335 bp, Homo sapiens
  misc_feature (1)..(335): n=a,t,g or c
tngttgttttattncacatcactccttgattatactgatatggaaaaaggatttagtacagttatgctcagaggaacactggacccatgtggcagggtcaagcaactagaacatgattcaganntcagtgaaagatacacttggacaggaccaagaggcatttcnctgccatgaaacaaggcnggnagggnttctaatacacacaccagggaagcactcctgcccctcagaggtcaaggagctgatcctatnttggtatgaggaatggcttattttcngatgaccacatgtgggnctttttcaacccgccacaagaacccccagaagggttattg

SEQ ID NO: 7562 - DNA, 512 bp, Homo sapiens
cttttcctcagctgccgccaaggtgctcggtccttccgaggaagctaaggctgcgttggggtgaggccctcacttcatccggcgactagcaccgcgtccggcagcgccagccctacactcgcccgcgccatggcctctgtctccgagctcgcctgcatctactcggccctcattctgcacgacgatgaggtgacagtcacggaggataagatcaatgccctcattaaagcagccggtgtaaatgttgagcctttttggcctggcttgtttgcaaaggccctggccaacgtcaacattgggagcctcatctgcaatgtaggggccggtggacctgctccagcagctggtgctgcaccagcaggaggtcctgccccctccactgctgctgctccagctgaggagaagaaagtggaagcaaagaaagaagaatccgaggagtctgatgatgacatgggctttggtctttttgactaaacctcttttataacatgttcaataaaaagctgaacttt

SEQ ID NO: 7563 - DNA, 347 bp, Homo sapiens
  misc_feature (1)..(347): n=a,t,g or c
naantctattgaattttatttntgagnaaaacatgttacactggagaaaggacattcaggacctgtccncccaagncggtgtccatatatgcaactatattncatgttgtaatacaaaggnttaaactacaaaagtgaaaattaaaagncattgcatatgtggggtaaaggaggggataaaggaagagnccacggttaaggnctttncattctgccttggcaacaaaacgacacagaagagaggcagcacgtttgcccgcgtagaggccctgcggctcagaggaagctggaagcgccggtcagtgccatgcagcagcctgggttctcgctcggctggccantcagtg

SEQ ID NO: 7564 - DNA, 3530 bp, Homo sapiens
agatctgccgacgccgcagacccccttcccccagcccagggtcggaggcgagtcgccgggggtcggcagaggtcagcagcctgcgagaccctcccaggctcgtggccctaggcgcggcagctgacacgtaagtctcgtcgcccgacgttgtttcggcgctcagaaacaacgtaaagtaaaggggcggggcagcgttttacaaaccgaaccgtgaatctttgcggtttctctttccagccagcgccgagcgatgggtgagtgtgctctgcattgaggcgggtgaagggaggttgagctcaatcaggccccatcctgcttcacagcctactgaggagtccagacgccccgacccccagccagggacagccacgaggagtggtggccctcgggtttcggccgcccagcccgtctctgggggctgcgaaggctctgggctccgggttccgggcgcgggctgcgggctccgacgggcgccaacatggctgccgcgaggaggaggccccggcctggccgcacgtgtatgatgacaactcggtaatgctgcatactcccgagtgcgcggtggggaagccaaccttggagagctgagcgtgcgaccggccggcgcgggggtctccgggagctggcgagtcgctagcaccgagtcacagtggctcaagcttccttccccgcttccacatgcaggcatctctcgggacaactggcacaagcgccgcaaaaccgggggcaagagaaagccctaccacaagaagcggaagtatgagttggggcgcccagctgccaacaccaaggtgggtgcgagcgtgggcctgtccgcctgggaggtcgccttcccccgctctccagcgtgctcgggtctttccgtgtgacagttgtgcgttctttcttgggctctgatttctctgtagtagggcctgggtgtcctgtccccctttagctgttggataagtaagtaccaaagagggaatgctccctcaggcccccaaacctggagcttaggatttcagagagaaggatactgtgtggggacttgagcttctggagagggtggcgcctcgcgtcatagtcagaagcctagtcttgttttttttacagaggcttaattttcagcatttggggtcaggctttcctcttggaggcaagtagggtgatgaaaaagaatccttaggcgtggttgtggccgtcttggtcacctgtgtgccacttgccaatgcaaggacttgtcatagttacactgactgttgcctcctcccggcccaggttcctctccctcacttgccttgctctccttggtaacctagttcctgtaaccttgtgttttccagattggcccccgccgcatccacacagtccgtgtgcggggaggtaacaagaaataccgtgccctgaggttggacgtggggaatttctcctggggctcagagtgtgagtgaggccctttgggagtgggtgggaaaacgcacctaaacggtcttaagattcaccaagtgggcctggcgcggtggctcacgcctataagcccagcacgttgggaggccgaggcgggcggatcacctgaggtcaggagttcgagtccagcctgggcaacagagcgagactctcagtaaaaaaaaagattcaagtgcttttagcaagtagtctgtggcttagaccaaggcatttgaagtttctccttgctgaaagatcttaaggtagctggggagttctctccacccaggctgtcctgctccaatctctttttttgagattgggtctctgttgctcaggctggagtgccagtggcgtgatcttggttcactgcagcctccgcctcctgggttgaagtgattctcctgcctcagcctcccaagaagctgggattacaggcgtgtgccatcacacccggctgcttctgtatttttagtagagacggggtttcaccatgttggccaggctggtctcaaattcttggctttaagtgatccacccgccttgacctcccaaagtgctggggttacgggcgtgagtcaccgtgcccgacctgctctgatctttctgaactctgcagcctgagagattggggctggtaaagactgcgggttgccaaacataactagaaacgtgggttagggggttgtggaagacgaactgatgccccatggcttgtaaaggctgagagttcccttatttctccttaaggcctcatggggctgaagaacctggaaggaagtgtgccaggccattgtcctcagtttacttatgccaaatttctcctgtgagcaggttgtactcgtaaaacaaggatcatcgatgttgtctacaatgcatctaataacgagctggttcgtaccaagaccctggtgaagaattgcatcgtgctcatcgacagcacaccgtaccgacagtggtacgagtcccactatgcgctgcccctgggccgcaagaagggagccaagctggtgcgtgttacttccctgtaggggttgtggggagggcagcctgactccagccttctcgtgatgaaaactctgtccagttctgctactgaagggagagagatgagagccttttaggctgaggaaggccagcactggggtgtgcagggttcgagaaagctcccagggcctgccttccttccctgagctcatatatttgtatccccttttcagactcctgaggaagaagagattttaaacaaaaaacgatctaaaaaaattcagaagaaatatgatgaaaggaaaaagaatgccaaaatcagcagtctcctggaggagcagttccagcagggcaagcttcttggtgagaaggctgttgtgttggaggtggggagtcgcagagattgagtgtgccgaggcacttttcccttgtctcagttcctttgactgccagccatgcagtctaaagggttcactgataacaggctgcgagcacaaaggggaacgtttggtcaccctattcgtatgaagctgaaatgggaagcattgggtagaagagtctgcataggcccgtgcttggagtctttgtatttggggaagtctctgcccaggctgagggggctgtctcagtgatgaaaactttgtccagttctgctactgacagtaagtgaagataaagtgtgtctgaggagacagctggcttcatgcttgcccccagggtacctgaacccacagagattcttaagcgggtggagaggtttgggtagggccaccttgtcgttgtgctaaggatcacctactctcttgcagcgtgcatcgcttcaaggccgggacagtgtggccgagcagatggctatgtgctagagggcaaagagttggagttctatcttaggaaaatcaaggcccgcaaaggcaaataaatccttgttttgtcttcacccatgtaataaaggtgtttattgttttgttcccacatttatgttgcctgaatatatgactgttttctctgctttatttccttgccctgcaaaactgatctgggtgggtggctgcaaccccttgccttaacctctgcctcctactgtcctgagccaggctcaccacactgtaaagtcc

SEQ ID NO: 7565 - DNA, 485 bp, Homo sapiens
gtcgccgctgcggagggagccgccgccatgtctgcgcatctgcaatggatggtcgtgcggaactgctccagtttcctgatcaagaggaataagcagacctacagcactgagcccaataacttgaaggcccgcaattccttccgctacaacggactgattcaccgcaagactgtgggcgtggagccggcagccgacggcaaaggtgtcgtggtggtcattaagcggagatccggccagcggaagcctgccacctcctatgtgcggaccaccatcaacaagaatgctcgcgccacgctcagcagcatcagacacatgatccgcaagaacaagtaccgccccgacctgcgcatggcagccatccgcagggccagcgccatcctgcgcacgcagaagcctgtgatggtgaagaggaagcggacccgccccaccaagagctcctgagccccctgcccccagagcaataaagtcagctggctttctcaaaa

SEQ ID NO: 7566 - DNA, 406 bp, Homo sapiens; identical to SEQ ID NO: 294

SEQ ID NO: 7567 - DNA, 489 bp, Homo sapiens
tttttttttttttttttttttttttttttttggaagaaaatgactttattctaattaactcacaaagaataaaatcataacataacagctagtttaaggaggccacacaaacatttgcccagtcccagattctacagagtagggacacccccacttccatttcaattctgaagcaaggaagctaggaatgacaggagaggtttaactgatggttacactttataccctcactatcaattctatttttatactaaattaacttagttatgagagctgattttccatctctccaggttgaacttcttcattaggccaatccgtttgcaagtcggcactgtttcagcacctcattgaaaccctcacagagcttgatgtcaccctggttctgggcacactccagaaactgtttgatctcatagaggcaaggctgctgctgctgtgctgggctgggttccctgaggctcctggtaagtgatgtcaggcctcgca

SEQ ID NO: 7568 - DNA, 466 bp, Homo sapiens; identical to SEQ ID NO: 652

SEQ ID NO: 7569 - DNA, 934 bp, Homo sapiens
ggcatccacttcttttccgacaaaacaccaaatggcggatgacgccggtgcagcgggggggcccggaggctggtggccctgggatggggaaccgcggtggcttccgcgaggtttcggcagtggcattcggggccggggtcgcggcgtggacggggccggggcgaggcgcggagctcgcgaggcaaggccgaggataaggagtggatgcccgtcaccaagttgggccgcttggtcaaggacatgaagatcaagtccctggaggagatctatctcttctccctgcccattaaggaatcagagatcattgatttcttcctgggggcctctctcaaggatgaggttttgaagattatgccagtgcagaagcagacccgtgccggccagcgcaccaggttcaaggcatttgttgctatcggggactacaatggccacgtcggtctgggtgttaagtgctccaaggaggtggccaccgccatccgtggggccatcatcctggccaagctctccatcgtccccgtgcgcagaggctactgggggaacaagatcggcaagccccacactgtcccctgcaaggtgacaggccgctgcggctctgtgctggtacgcctcatccctgcacccaggggcactggcatcgtctccgcacctgtgcctaagaagctgctcatgatggctggtatcgatgactgctacacctcagcccggggctgcactgccaccctgggcaacttcgccaaggccacctttgatgccatttctaagacctacagctacctgacccccgacctctggaaggagactgtattcaccaagtctccctatcaggagttcactgaccacctcgtcaagacccacaccagagtctccgtgcagcggactcaggctccagctgtggctacaacatagggtttttatacaagaaaaataaagtgaa

SEQ ID NO: 7570 - DNA, 538 bp, Homo sapiens
gcgccgcggtgaggttgtctagtccacgctcggagccatgccgtccaagggtccgctgcagtcggtgcaggtcttcggacgcaagaagacagcgacagctgtggcgcactgcaaacgcggcaatggtctcatcaaggtgaacgggcggcccctggagatgattgagccgcgcacgctacagtacaagctgctggagccagttctgcttctcggcaaggagcgatttgctggtgtagacatccgtgtccgtgtaaagggtggtggtcacgtggcccagatttatgctatccgtcagtccatctccaaagccctggtggcctattaccagaaatatgtggatgaggcttccaagaaggagatcaaagacatcctcatccagtatgaccggaccctgctggtagctgaccctcgtcgctgcgagtccaaaaagtttggaggccctggtgcccgcgctcgctaccagaaatcctaccgataagcccatcgtgactcaaaactcacttgtataataaacagtttttgagggattttaaagttt

SEQ ID NO: 7571 - DNA, 1929 bp, Homo sapiens
acccccgcacccagctccgcagaccggcgggcgcgcgcgggctctggaggccacgggcatgatgcttcgggtcctggtgggggctgtcctccctgccatgctactggctgccccaccacccatcaacaagctggcactgttcccagataagagtgcctggtgcgaagccaagaacatcacccagatcgtgggccacagcggctgtgaggccaagtccatccagaacagggcgtgcctaggacagtgcttcagctacagcgtccccaacaccttcccacagtccacagagtccctggttcactgtgactcctgcatgccagcccagtccatgtgggagattgtgacgctggagtgcccgggccacgaggaggtgcccagggtggacaagctggtggagaagatcctgcactgtagctgccaggcctgcggcaaggagcctagtcacgaggggctgagcgtctatgtgcagggcgaggacgggccgggatcccagcccggcacccaccctcacccccatccccacccccatcctggcgggcagacccctgagcccgaggacccccctggggccccccacacagaggaagagggggctgaggactgaggcccccccaactcttcctcccctctcatccccctgtggaatgttgggtctcactctctggggaagtcaggggagaagctgaagcccccctttggcactggatggacttggcttcagactcggacttgaatgctgcccggttgccatggagatctgaaggggcggggttagagccaagctgcacaatttaatatattcaagagtggggggaggaagcagaggtcttcagggctctttttttggggggggggtggtctcttcctgtctggcttctagagatgtgcctgtgggagggggaggaagttggctgagccattgagtgctgggggaggccatccaagatggcatgaatcgggctaaggtccctgggggtgcagatggtactgctgaggtcccgggcttagtgtgagcatcttgccagcctcaggcttgagggagggctgggctagaaagaccactggcagaaacaggaggctccggccccacaggtttccccaaggcctctcaccccacttcccatctccagggaagcgtcgccccagtggcactgaagtggccctccctcagcggaggggtttgggagtcaggcctgggcaggaccctgctgactcgtggcgcgggagctgggagccaggctctccgggcctttctctggcttccttggcttgcctggtgggggaaggggaggaggggaagaaggaaagggaagagtcttccaaggccagagggagggggacaaccccccaagaccatccctgaagacgagcatccccctcctctccctgttagaaatgttagtgccccgcactgtgccccaagttctaggccccccagaaagctgtcagagccggccgccttctcccctctcccagggatgctctttgtaaatatcggatgggtgtgggagtgaggggttacctccctcgccccaaggttccagaggccctaggcgggatgggctcgctgaacctcgaggaactccaggacgaggaggacatgggacttgcgtggacagtcagggttcacttgggctctctctagctccccaattctgcctgcctcctccctcccagctgcactttaaccctagaaggtggggacctggggggagggacagggcaggcgggcccatgaagaaagcccctcgttgcccagcactgtctgcgtctgctcttctgtgcccagggtggctgccagcccactgcctcctgcctggggtggcctggccctcctggctgttgcgacgcgggcttctggagcttgtcaccattggacagtctccctgatggaccctcagtcttctcatgaataaattcttcggaatt

SEQ ID NO: 7572 - DNA, 830 bp, Homo sapiens
cccccccgagcgccgctccggctgcaccgcgctcgctccgagtttcaggctcgtgctaagctagcgccgtcgtcgtctcccttcagtcgccatcatgattatctaccgggacctcatcagccacgatgagatgttctccgacatctacaagatccgggagatcgcggacgggttgtgcctggaggtggaggggaagatggtcagtaggacagaaggtaacattgatgactcgctcattggtggaaatgcctccgctgaaggccccgagggcgaaggtaccgaaagcacagtaatcactggtgtcgatattgtcatgaaccatcacctgcaggaaacaagtttcacaaaagaagcctacaagaagtacatcaaagattacatgaaatcaatcaaagggaaacttgaagaacagagaccagaaagagtaaaaccttttatgacaggggctgcagaacaaatcaagcacatccttgctaatttcaaaaactaccagttctttattggtgaaaacatgaatccagatggcatggttgctctattggactaccgtgaggatggtgtgaccccatatatgattttctttaaggatggtttagaaatggaaaaatgttaacaaatgtggcaattattttggatctatcacctgtcatcataactggcttctgcttgtcatccacacaacaccaggacttaagacaaatgggactgatgtcatcttgagctcttcatttattttgactgtgatttatttggagtggaggcattgtttttaagaaaaacatgtcatgtaggttgtctaaaaataaaatgcatttaaactcatttgagag

SEQ ID NO: 7573 - DNA, 322 bp, Homo sapiens
tttttttttttttttttttttttgggagcagggagaactttattgaggttatgaatatattctacttgaaactggaaggataagtggtcatgaatttgtggcttatggtaacctttgttaagcatctttctttttctttttttttttggtgagacacagattcactcttgtcccccaggctggagtgcaatggcgtgatctcggctcactgcatcctctgcctcccaggtccaagcgattctcgtacctcagcctcccgagtagctgggattacaggcatgtgccaagcatgcttggctaattttgtatttttagtagagat

SEQ ID NO: 7574 - DNA, 320 bp, Homo sapiens
  misc_feature (1)..(320): n=a,t,g or c
acatntcctgggccagctacattttactaaatggtggatgatggcatagtacatttaacagctaaaaagaaaatgcacatgtgaataattattactcaattaaattttcatgtaggaaaataaaatcttggtaaatgaaaaaaactggtcataaggtcataaatcctagaaaccctcatgaggctctcagacaactgggaaccgtttacggtccatgtgtgaaggaagattaatttcaggtaaataacattcaaagtcaattacatatatggctacaaagttagtaattatgtgttataaagattcatataactaagccg

SEQ ID NO: 7575 - DNA, 271 bp, Homo sapiens
catttctgaagaagcatttattagcatgcagggcccatgctagaggctccttatttccagggcaaggcagcgagacagagcccattgctcaggacgcagcccagattgcaaagagaggacagcccatggtagcggaagaaattctggcggagagcactgtacttggggtccttctctcgcagctggcggtagggatcgggaccctggtggctgcctggtacctccccacccaggcctcgctccttctccacggtttgcagggcccacatgg

SEQ ID NO: 7576 - DNA, 379 bp, Homo sapiens; identical to SEQ ID NO: 3403

SEQ ID NO: 7577 - DNA, 253 bp, Homo sapiens
accttactaccagacaaccttagccaaaccatttacccaaataaagtataggcgatagaaattgaaacctggcgcaatagatatagtaccgcaagggaaagatgaaaaattataaccaagcataatatagcaaggactaacccctataccttctgcataatgaattaactagaaataactttgcaaggagagccaaagctaagacccccgaaaccagacgagctacctaagaacagctaaaagagcacacccg

SEQ ID NO: 7578 - DNA, 507 bp, Homo sapiens
cgtctgggctgccaacatgccatccagactgaggaagacccggaaacttaggggccacgtgagccacggccacggccgcataggcaagcaccggaagcaccccggcggccgcggtaatgctggtggtctgcatcaccaccggatcaacttcgacaaataccacccaggctactttgggaaagttggtatgaagcattaccacttaaagaggaaccagagcttctgcccaactgtcaaccttgacaaattgtggactttggtcagtgaacagacacgggtgaatgctgctaaaaacaagactggggctgctcccatcattgatgtggtgcgatcgggctactacaaagttctgggaaagggaaagctcccaaagcagcctgtcatcgtgaaggccaaattcttcagcagaagagctgaggagaagattaagagtgttgggggggcctgtgtcctggtggcttgaagcacatggagggagtttcattaaatgctaactacttttaaaaa

SEQ ID NO: 7579 - DNA, 401 bp, Homo sapiens
  misc_feature (1)..(401): n=a,t,g or c
catcaaacccctttatttccatttggtcccaaggcttgttaggatagttaagaaagctgncnattgntggagggagaggcttaggagaagcctattactttgcaaggggccttcagaagtcgctgggctcagaaggctcttagtcgtgcttnagagtnagccnttcgaagagatantcgccngccngcttccggcaaccagcctgttgaggttggtcaggtngtcacccatcttcttgataagcttcacttcctcatctaggaagtgagtctccagggaagtcacagagatgggggtccgtgcgggcagaacccagggcatgaagntccaaaagggctggttcagtttttctccaggggccatggcagctttcatggcgtctnggggttttacccacttca

SEQ ID NO: 7580 - DNA, 414 bp, Homo sapiens
ccgcagaatggctcccgcaaagaagggtggcgagaagaaaaagggccgttctgccatcaacgaagtggtaacccgagaatacaccatcaacattcacaagcgcatccatggagtgggcttcaagaagcgtgcacctcgggcactcaaagagattcggaaatttgccatgaaggagatgggaactccagatgtgcgcattgacaccaggctcaacaaagctgtctgggccaaaggaataaggaatgtgccataccgaatccgtgtgcggctgtccagaaaacgtaatgaggatgaagattcaccaaataagctatatactttggttacctatgtacctgttaccactttcaaaaatctacagacagtcaatgtggatgagaactaatcgctgatcaaataacgttataaaattgc

SEQ ID NO: 7581 - DNA, 379 bp, Homo sapiens
gagtttagaactcaaactttatttgtgctgtaaaggggaagaaaagtgattagtaattatgtacatgacgtaacagaattagttcttaccatacagagcaacataccagtactttcaaccatctacttttacagtttcaatttcacaacagcatacccgagactacttccccatacatgcgtgactaatacactctaaatcccaacgacagtaattgtttgcatcatccccaagtcattggttaagaactgaactaccatgtcaacatatttttaaacatttaaaaaatggaacccagaagacagaaagatcccaacgataaaaataaccatgatttttaaaatttcaagtgaaacttaaagggaagaaggaaatgata

SEQ ID NO: 7582 - DNA, 488 bp, Homo sapiens
tggcgccgacaggatgggcaagtgtcgtggacttcgtactgctaggaagctccgtagtcaccgacgagaccagaagtggcatgataaacagtataagaaagctcatttgggcacagccctaaaggccaacccttttggaggtgcttctcatgcaaaaggaatcgtgctggaaaaagtaggagttgaagccaaacagccaaattctgccattaggaagtgtgtaagggtccagctgatcaagaatggcaagaaaatcacagcctttgtacccaatgacggttgcttgaactttattgaggaaaatgatgaagttctggttgctggatttggtcgcaaaggtcatgctgttggtgatattcctggagtccgctttaaggttgtcaaagtagccaatgtttctcttttggccctatacaaaggcaagaaggaaagaccaagatcataaatattaatggtgaaaacactgtagtaataaattttcatatgcc

SEQ ID NO: 7583 - DNA, 3107 bp, Homo sapiens
ctgcagtgaacggtgatcacaccactgcacaccagcctggggacacagccagactttgtcacaaaaaagcaaaaacaactggccagtgtatgaggggctcgtgttttttgtttgtctgtttgttgagacagagtctcactctgtcgccagactggaatgcagtggcacattctcggcccactgcaatctctgcctcctaggttcaagcaattatctgcctcagcctcccaagtagctgggattacaggcgcccgcaccacgcccggctaatttttttgtatttttagtagagacggggtttcaccaccttggccaggctggtcttgaacccctgacctcatgatccacccgcctcggcctcccaaagtgctgggattacaggcgtgagcctcccgcccggccaggggcgcgcgtttttaaaacatgggagagggaattgtgcttcacaatcaccatcaggtgtctcgatatcgggtgccacgccgtcccgcttctgaggcgcggcggcccactttggcaggccgaggcgggtggattacctgaggtcaggagttcgagaccagcctgacaaacatggtgaaaccccgtctctactaaaaatacaaaaaattagccggacgtggtggcgcatgcctgtaatcccagctacttgggaggctgaggcaggagaatcgcttgaacccgggaggcggaggttgcgatgagccgagatcgcgccattgcactccagcctgggaaacaagagcgaaatccgtctcaagaaaaaaaaggaaagaccccccctccttctcccgccggaaataccctctttcaggacggcgcgcctgtgcggcgacgcgcgctcagttacttagcaacctcggcgctaagccaccccaggtggagcccagcaacaacagagccaccgcgtcccccaccaatcagcgccgacctcgccttcgcaggcctaaccaatcagtgccggcgctgcaaggaagtttccagagctttcgaggaaggtttcttcaactcaaattcatccgcctgataattttcttatattttcctaaagaaggaagagaagcgcatagaggagaagggaaataattttttaggagcctttcttacggctatgaggaatttggggctcagttgaaaagcctaaactgcctctcgggaggttgggcgcggcgaactactttcagcggcgcacggagacggcgtctacgtgaggggtgataagtgacgcaacactcgttgcataaatttgcctccgccagcccggagcatttaggggcggttggctttgttgggtgagcttgtttgtgtccctgtgggtggacgtggttggtgattggcaggatcctggtatccgctaacaggtactggcccgcagccgtaacgaccttgggggggtgtgagaggggggaatgggtgaggtcaaggtggaggcttcttggggttgggtgggccgctgaggggagggcgtgggggaggggagggcgaggtgacgcggcgctgggcctttccgggacagtgggccttgttgacctgaggggggcgagggcggttggcgcgcgcgggttgacggaaactaacggacgcctaaccgatcggcgattctgtcgagtttacttcgcggggaaggcggaaaagaggtagtttgtgtggtttctggaagcctttactttggaatcccagtgtgagaaaggtgccccttcttgtgtttcaatgggatttttatttcgcgagtcttgtgggtttggttttgttttcagtttgcctaacaccgtgcttaggtttgaggcagattggagttcggtcgggggagtttgaatatccggaacagttagtggggaaagctgtggacgcttggtaagagagcgctctggattttccgctgttgacgttgaaaccttgaatgacgaatttcgtattaagtgacttagccttgtaaaattgaggggaggcttgcggaatattaacgtatttaaggcattttgaaggaatagttgctaattttgaagaatattaggtgtaaaagcaagaaatacaatgatcctgaggtgacacgcttatgttttacttttaaactaggtcaaaatgcagatcttcgtgaaaacccttaccggcaagaccatcacccttgaggtggagcccagtgacaccatcgaaaatgtgaaggccaagatccaggataaggaaggcattccccccgaccagcagaggctcatctttgcaggcaagcagctggaagatggccgtactctttctgactacaacatccagaaggagtcgaccctgcacctggtcctgcgtctgagaggtggtatgcagatcttcgtgaagaccctgaccggcaagaccatcaccctggaagtggagcccagtgacaccatcgaaaatgtgaaggccaagatccaggataaagaaggcatccctcccgaccagcagaggctcatctttgcaggcaagcagctggaagatggccgcactctttctgactacaacatccagaaggagtcgaccctgcacctggtcctgcgtctgagaggtggtatgcagatcttcgtgaagaccctgaccggcaagaccatcactctggaagtggagcccagtgacaccatcgaaaatgtgaaggccaagatccaagataaagaaggcatccctcccgaccagcagaggctcatctttgcaggcaagcagctggaagatggccgcactctttctgactacaacatccagaaggagtcgaccctgcacctggtcctgcgcctgaggggtggctgttaattcttcagtcatggcattcgcagtgcccagtgatggcattactctgcactatagccatttgccccaacttaagtttagaaattacaagtttcagtaatagctgaacctgttcaaaatgttaataaaggtttcgttgcatggtagcatacttggtgttttgtcatgaaattctctagtgatgtgtgggtacgcttaaaactggtgaaaatgtttagggatttaattttgagattggtaatgtgctcaaagttaagtcacttgactttggtatacacttgggtgggctgaggggcaagagccttctttgctgtttaagtcattacaagttaggatcc

SEQ ID NO: 7584 - DNA, 343 bp, Homo sapiens
ttttttacactgttaaaaacatttattctgatacattctatcataagttagtacaagatccactctgctacagatgcgtctgtgaagagccttgtgccatccaactagtgactgaatgatgtcccatctcttatccgagccagagcacacatcttccatgctgtccgctgattgcctccaaatccagaagaccaaataatcctttatccccaaagtaggctcaaaacagttggttcaggcattccgggatctgcacccctcttaaatcccaggtaaatcacaagagggataaagccccagcgaatggcaaactggctccccttgaagagctgctgtagtctct

SEQ ID NO: 7585 - DNA, 822 bp, Homo sapiens
acggaacagatccggggactctcttccagcctccgaccgccctccgatttcctctccgcttgcaacctccgggaccatcttctcggccatctcctgcttctgggacctgccagcaccgtttttgtggttagctccttcttgccaaccaaccatgagctcccagattcgtcagaattattccaccgacgtggaggcagccgtcaacagcctggtcaatttgtacctgcaggcctcctacacctacctctctctgggcttctatttcgaccgcgatgatgtggctctggaaggcgtgagccacttcttccgcgaactggccgaggagaagcgcgagggctacgagcgtctcctgaagatgcaaaaccagcgtggcggccgcgctctcttccaggacatcaagaagccagctgaagatgagtggggtaaaaccccagacgccatgaaagctgccatggccctggagaaaaagctgaaccaggcccttttggatcttcatgccctgggttctgcccgcacggacccccatctctgtgacttcctggagactcacttcctagatgaggaagtgaagcttatcaagaagatgggtgaccacctgaccaacctccacaggctgggtggcccggaggctgggctgggcgagtatctcttcgaaaggctcactctcaagcacgactaagagccttctgagcccagcgacttctgaagggccccttgcaaagtaatagggcttctgcctaagcctctccctccagccaataggcagctttcttaactatcctaacaagccttggaccaaatggaaataaagctttttgatgc

SEQ ID NO: 7586 - DNA, 510 bp, Homo sapiens
ctggcagcgcggaggccgcacgatgcctggagttactgtaaaagacgtgaaccagcaggagttcgtcagagctctggcagccttcctcaaaaagtccgggaagctgaaagtccccgaatgggtggataccgtcaagctggccaagcacaaagagcttgctccctacgatgagaactggttctacacgcgagctgcttccacagcgcggcacctgtacctccggggtggcgctggggttggctccatgaccaagatctatgggggacgtcagagaaacggcgtcatgcccagccacttcagccgaggctccaagagtgtggcccgccgggtcctccaagccctggaggggctgaaaatggtggaaaaggaccaagatggcggccgcaaactgacacctcagggacaaagagatctggacagaatcgccggacaggtggcagctgccaacaagaagcattagaacaaaccatgctgggttaataaattgcctcattcgtaaaaaaaaaaaaa

SEQ ID NO: 7587 - DNA, 925 bp, Homo sapiens
tggtctagatatttaatgcaaatcttttacttagcttaactttaaggttaaaaattaccaaaagtactttggaaactattcataggcagatttactgtaaacaaattatttttgaaataatgtttttcgcttttcacaagatggcaccgaaagcgaaggaagctcctgctcctcctaaagccgaagccaaagcgaaggctttaaaggccaagaaggcagtgttgaaaggtgtccgcagccacacgcaaaaaagaagatccgcatgtcacccaccttcaggcggcccaagacactgcgactccggaggcagcccagatatcctcggaagagcacccccaggagaaacaagcttggccactatgctatcatcaagtttccgctgaccactgagtcggccgtgaagaagatagaagaaaacaacacgcttgtgttcactgtggatgttaaagccaacaagcaccagatcagacaggctgtgaagaagctctatgacagtgatgtggccaaggtcaccaccctgatttgtcctgataaagagaacaaggcatatgttcgacttgctcctgattatgatgctttcgatgttgtaacaaaattgggatcacctaaactgagtccagctggctaactctaaatatatgtgtatcttttcagcataaaaaaataatgtttttcataagaatgacaacttaattagaatcaaatctataagcttttaagattttacgtttctagtaagtataatattagcttatttgactagaactcaagcagaataggaatttatgcttgttttatattcaataatgatagttttgaagatatagttgttttattacaccaaaaaatactatattaatcttatttaactaagttttatccaaatcatgttaacttaagaaacatttgatcagttcctatattt

SEQ ID NO: 7588 - DNA, 398 bp, Homo sapiens
cagctagaagagattttttattgaagggcgagtctccggcatctgatggcagctacaactggatctcacggaacgcccgcttctccaccagcttcaccttgtacttgcgtttgaacttggctctctctcgaggctcgatcatattcctcctctggaagctcttgaaccggtctcgaaggatgttgccctcgggcttcagggtcctgagcgagtctgtcagctccgagctcagctgcacgtcgatgtcaggtgcctggtacttgagccgtcccagccttcggggcttggcagcctcagcctcccgccgcgcctgccgccgcctccgccgccgcgccagctccgccagcctcagggccacctgggccttgatcccgcgcaccgggaacagctcctggtgc

SEQ ID NO: 7589 - DNA, 247 bp, Homo sapiens
ggcaaacacgtattgctttatttagtgtttctctggattgcagaagtgtcagcagtgggctgagacccccagaagggcatagaggcagctgggcagcccccaggcccttgagggtaggagcagggagaagcagcagaaggaggtgatgcccctgccgctcctcccaaggccagccccgtccccacgctcccatgccagggaggggtcaggggccagaaaaggccttacatccttgagtggggcccga

SEQ ID NO: 7590 - DNA, 372 bp, Homo sapiens
tttttttttttttttttttttatggggtgtgataggtgtgagtgtctctagggtgatacgtgggtgagaaaggtcctggtccgcgccagagcccagcgcgcctcgtcgccatgcctcggaaaattgaggaaatcaaggacttcctgctcacagcccgacgaaaggatgccaaatctgtcaagatcaagaaaaataaggacaacgtgaagtttaaagttcgatgcagcagatacctttacaccctggtcatcactgacaaagagaaggcagagaaactgaagcagtccctgccccccggtttggcagtgaaggaactgaaatgaaccagacacactgattggaactgtattatattaaaatactaaaaatcct

SEQ ID NO: 7591 - DNA, 397 bp, Homo sapiens
  misc_feature (1)..(397): n=a,t,g or c
tttatggtttttatttttcaatttttattttggttttcttacaaaggttgacattttccataacaggtgtaagagtgttgaaaaaaaaattcaaatttcncncggngcgggggaaggagttaatgaaactgtattgcacaatgctctgatcaatccttctttttctcttttgcccacaatttaagcaagtagatgtgcagaagaaatggaaggattcagctttcagttaaaaaagaagaagaagaaatggcaaagagaaagttttttcaaatttctttcttttttaatttagattgagttcatttatttgaaacagactgggccaatggtccacaaagaattcccggtcagcaccaccggatgtccaaaggtggcaatatccagggaagggcaggcg

SEQ ID NO: 7592 - DNA, 346 bp, Homo sapiens
  misc_feature (1)..(346): n=a,t,g or c
cgtggtgcnggcaccatgtctcggtagcactgggtgncagcgcctgcagtggtcaggtcccggtattcccggtacatgttgtgngtgccgctccgggagtcatagcgcancagatcccgaagttcttcaccctcaggggaacttctcaaacacctgcccacagtagacaatctcccctgaagacttcttcatcttctttaactgagatacaaagtaccagaagcgggacttggcgacgacatgattaaggcgcaaagattcgcatgcggtataaggggcggcgtgtggcatttgggggtgggcaggcagcgacccactaccttgtactctcgtagcgtgcccgagg

SEQ ID NO: 7593 - DNA, 268 bp, Homo sapiens; identical to SEQ ID NO: 833

SEQ ID NO: 7594 - DNA, 307 bp, Homo sapiens
tttcgcgtttgtttttctttatttctttatttcacatacacattagccattcaatggagaagccggagagagtcaggcaaagatggtataacagaagcgcagtgacgggggcggggtcagggggaggaaggcagttctgcatcctttcttgctttctgtcctctacttgacagagtccatgtcgcgtgtttctttctgcttggctgctggtgcacagctccaccgagaccccttccaagggctctctgagaactgggctgcttctgggggcccgcgggggtccccgggctgggaggagagaagggct

SEQ ID NO: 7595 - DNA, 497 bp, Homo sapiens
ttttttttttttttttgtccgacatcttgagacgaggctgcggtgtctgctgctattctccgagcttcgcaatgccgcctaaggacgacaagaagaagaaggacgctggaaagtcggccaagaaagacaaagacccagtgaacaaatccgggggcaaggccaaaaagaagaagtggtccaaaggcaaagttcgggacaagctcaataacttagtcttgtttgacaaagctacctatgataaactctgtaaggaagttcccaactataaacttataaccccagctgtggtctctgagagactgaagattcgaggctccctggccagggcagcccttcaggagctccttagtaaaggacttatcaaactggtttcaaagcacagagctcaagtaatttacaccagaaataccaagggtggagatgctccagctgctggtgaagatgcatgaataggtccaaccagctgtacatttggaaaaataaaactttattaaatc

SEQ ID NO: 7596 - DNA, 411 bp, Homo sapiens
  misc_feature (1)..(411): n=a,t,g or c
ctaattactaccttttattctaatgtgaaccatgggccctggaaagctgataacaagcttggctgagcagagggaactaggggtcaggcagaaaggattatgggntggaaaacattggctcttccttgggnagtggatgctngggaaaggggaagagagtggctcancctggcaggtaaataggctagaaaagccaaggccaaanctggngaggggagaggacagtcagcatgtccagcctggggtctgggtgtaagggttatcccttctccctggtgccttcccatctcgtccatgagcctaaggtcttgggagccttgtgttgggaggctgctgtgatgtcagggaacggggatctgtctagcttttggccacttcctggggacctcacacccctgtttganaaattgg

SEQ ID NO: 7597 - DNA, 744 bp, Homo sapiens
ctctttcccttcggtgtgccactgaagatcctggtgtcgccatgggccgccgccccgcccgttgttaccggtattgtaagaacaagccgtacccaaagtctcgcttctgccgaggtgtccctgatgccaagattcgcatttttgacctggggcggaaaaaggcaaaagtggatgagtttccgctttgtggccacatggtgtcagatgaatatgagcagctgtcctctgaagccctggaggctgcccgaatttgtgccaataagtacatggtaaaaagttgtggcaaagatggcttccatatccgggtgcggctccaccccttccacgtcatccgcatcaacaagatgttgtcctgtgctggggctgacaggctccaaacaggcatgcgaggtgcctttggaaagccccagggcactgtggccagggttcacattggccaagttatcatgtccatccgcaccaagctgcagaacaaggagcatgtgattgaggccctgcgcagggccaagttcaagtttcctggccgccagaagatccacatctcaaagaagtggggcttcaccaagttcaatgctgatgaatttgaagacatggtggctgaaaagcggctcatcccagatggctgtggggtcaagtacatccccagtcgtggccctctggacaagtggcgggccctgcactcatgagggcttccaatgtgctgcccccctcttaatactcaccaataaattctacttcctgtcc

SEQ ID NO: 7598 - DNA, 473 bp, Homo sapiens
  misc_feature (1)..(473): n=a,t,g or c
caggattttatttaaaatttatngtaatggggtccgcgcaaaangnnngggtggagggtggggtacatgcaggggacacaggaacacgatgacatggccagggcacaacttcttctgtcgtggggaagagggatgaaaagacaagaccagggctggagctggnntggnnnanggnnngggtanactggctgcnttnncccgcccccaggnnncacctctaggccctggacccctcgctcaccctggcccctaanactccatctcttctctgcctctggcctcctggctcttcctcctgctccccttgactttttcccctgacagattctcaagtanggaccgatgttcagggcctgaccccaaccccccatacnaccttatgaaggtacaacctttggnnggccctgcttctggccctcctcaaacctcacngntttgcccnctttgggacaagctctgaatcgccntccttc

SEQ ID NO: 7599 - DNA, 343 bp, Homo sapiens
  misc_feature (1)..(343): n=a,t,g or c
tttaactaaaatggtcacttttaatgggaaccagaggtatagttacaattacatagtccgacggggggaaacccttgggtgatcaggaatggggaaggttacaaaataacgagggtaacacttgggtacaggacaaaaagctgttccagaacctngggagccaggctaattaatacggcctctccctgcgatcctatctgtgctcacccctggaatccatcttgccagggccaaagccacctctntccccaccaccccngccccctcggaagcctccacggtccccgcctgcanccccggtangccgcctncgatcataagcntcctctngncaccactgacg

SEQ ID NO: 7600 - DNA, 137 bp, Homo sapiens
gaagagaagaagaagcaggatgaactgaaacggattgccagagaattggcagaagatgacagcatattaaagtgagtgaccctgcgacccactctttggaccagcagcggatgaataaagcttcctgtgttgtgtga

SEQ ID NO: 7601 - DNA, 341 bp, Homo sapiens
cactgtggagcacagttcatttgtcttgttggtttattggcctacagagttggacacacacacaaatgcggagataaatattggtcagtttctctaaatctgggtcctcactacgtatagagctagtctgtagaattctaaattttgcgtgctgcggcacagaaccagtggccttctcactctgccaccacccgtcttcccagggaacatggggaaagagggcacgaactgacaagacttgatcattttcaaaagacaaaactgcaaaatcccaaatttccaacatctgaaactcacaatattcaaattccccagctcaaattacatatattttaatctcc

SEQ ID NO: 7602 - DNA, 1272 bp, Homo sapiens
ggcgtgatgtctcacagaaagttctccgctcccagacatgggtccctcggcttcctgcctcggaagcgcagcagcaggcatcgtgggaaggtgaagagcttccctaaggatgacccatccaagccggtccacctcacagccttcctgggatacaaggctggcatgactcacatcgtgcgggaagtcgacaggccgggatccaaggtgaacaagaaggaggtggtggaggctgtgaccattgtagagacaccacccatggtggttgtgggcattgtgggctacgtggaaacccctcgaggcctccggaccttcaagactgtctttgctgagcacatcagtgatgaatgcaagaggcgtttctataagaattggcataaatctaagaagaaggcctttaccaagtactgcaagaaatggcaggatgaggatggcaagaagcagctggagaaggacttcagcagcatgaagaagtactgccaagtcatccgtgtcattgcccacacccagatgcgcctgcttcctctgcgccagaagaaggcccacctgatggagatccaggtgaacggaggcactgtggccgagaagctggactgggcccgcgagaggcttgagcagcaggtacctgtgaaccaagtgtttgggcaggatgagatgatcgacgtcatcggggtgaccaagggcaaaggctacaaaggggtcaccagtcgttggcacaccaagaagctgccccgcaagacccaccgaggcctgcgcaaggtggcctgtattggggcatggcatcctgctcgtgtagccttctctgtggcacgcgctgggcagaaaggctaccatcaccgcactgagatcaacaagaagatttataagattggccagggctaccttatcaaggacggcaagctgatcaagaacaatgcctccactgactatgacctatctgacaagagcatcaaccctctgggtggctttgtccactatggtgaagtgaccaatgactttgtcatgctgaaaggctgtgtggtgggaaccaagaagcgggtgctcaccctccgcaagtccttgctggtgcagacgaagcggcgggctctggagaagattgaccttaagttcattgacaccacctccaagtttggccatggccgcttccagaccatggaggagaagaaagcattcatgggaccactgaagaaagaccgaattgcaaaggaagaaggagcttaatgccaggaacagattttgcagttggtggggtctcaataaaattattttccactg

SEQ ID NO: 7603 - DNA, 1496 bp, Homo sapiens
ccattgtgctggaaaggcgcgcaacggcggcgacggcggcgaccccaccgcgcatcctgccaggcctccgcgcccagccgcccacgcgcccccgcgccccgcgccccgaccctttcttcgcgcccccgcccctcggcccgccaggcccccttgccggccacccgccaggccccgcgccggcccgcccgccgcccaggaccggcccgcgccccgcaggccgcccgccgcccgcgccgccatgggagtggagggctgcaccaagtgcatcaagtacctgctcttcgtcttcaatttcgtcttctggctggctggaggcgtgatcctgggtgtggccctgtggctccgccatgacccgcagaccaccaacctcctgtatctggagctgggagacaagcccgcgcccaacaccttctatgtaggcatctacatcctcatcgctgtgggcgctgtcatgatgttcgttggcttcctgggctgctacggggccatccaggaatcccagtgcctgctggggacgttcttcacctgcctggtcatcctgtttgcctgtgaggtggccgccggcatctggggctttgtcaacaaggaccagatcgccaaggatgtgaagcagttctatgaccaggccctacagcaggccgtggtggatgatgacgccaacaacgccaaggctgtggtgaagaccttccacgagacgcttgactgctgtggctccagcacactgactgctttgaccacctcagtgctcaagaacaatttgtgtccctcgggcagcaacatcatcagcaacctcttcaaggaggactgccaccagaagatcgatgacctcttctccgggaagctgtacctcatcggcattgctgccatcgtggtcgctgtgatcatgatcttcgagatgatcctgagcatggtgctgtgctgtggcatccggaacagctccgtgtactgaggccccgcagctctggccacagggacctctgcagtgccccctaagtgacccggacacttccgagggggccatcaccgcctgtgtatataacgtttccggtattactctgctacacgtagcctttttacttttggggttttgtttttgttctgaactttcctgttaccttttcagggctgatgtcacatgtaggtggcgtgtatgagtggagacgggcctgggtcttggggactggagggcaggggtccttctgcccctggggtcccagggtgctctgcctgctcagccaggcctctcctgggagccactcgcccagagactcagcttggccaacttggggggctgtgtccacccagcccgcccgtcctgtgggctgcacagctcaccttgttccctcctgccccggttcgagagccgagtctgtgggcactctctgccttcatgcacctgtcctttctaacacgtcgccttcaactgtaatcacaacatcctgactccgtcatttaataaagaaggaacatcaggcatgctaaaaaaaaaaaaaaaa

SEQ ID NO: 7604 - DNA, 274 bp, Homo sapiens
ccaaacgattgmatttattawwaaacaagkgatacagmccctagactcagaaacacaacagatttgrgctaagmcagctctsgbgaaacagtaatagrgggrggvvggaacasgrggtattcatgbcbggbccagagctgccatccagggccccacaccccaccttkggtccagatggcccattggcccaggkgtccctgctgccagaacaccgtggactggggtacaggagttgttgcatattccatgrggctggkgtcgggaagvagggact

SEQ ID NO: 7605 - DNA, 231 bp, Homo sapiens
  misc_feature (1)..(231): n=a,t,g or c
ttttttttttttttttttttccagagcaccagaaatttattaaattccccactttcccccaaaacacaattacccacacgcagcaagggggtgcggaggcccccagacctggctcctgcagcctgggccaggaggaccagcatggggacacaggagctatcaggcaggantcaggntgggggacgaggggacacgggatggggtgacagacaaggtagtgcaagggcagag

SEQ ID NO: 7606 - DNA, 280 bp, Homo sapiens
  misc_feature (1)..(280): n=a,t,g or c
aaatattctactttatttggtaaaactcagaaactaacaattcacatcctcccaccttcttctttccgaagaaggcagtttgcagagacaaaagggctgtggcgtggggatcatccaccatctccnggntttacacccaggntacccatggcttggcagtcaggnctntaggcnattggctctcagaggcantagaagaaaagtaaaaggnaggtctcacttcacagacattgaaaccctcctaacccttttccccantacccacaantccctacantgc

SEQ ID NO: 7607 - DNA, 507 bp, Homo sapiens; identical to SEQ ID NO: 6546
  misc_feature (1)..(507): n=a,t,g or c

SEQ ID NO: 7608 - DNA, 303 bp, Homo sapiens
acatcacaacatcgtttattatgtgamtyyyyyacaatacaaacaaaamatacagaaatgcaatatatgavtacagctaaatgcagamtggtgactttcytctcttcaagaggccatgattcccatttctagtaaaataaagagactgcatataggtagaaacaggttggtcattagcttcacaattttgcctagaaatgatctataamtgcatttccccccctkytacttaccataaagtgtaaaaagggrgttaaaggaaagyyccttkttggktccyaccawatgavgadggtatattct

SEQ ID NO: 7609 - DNA, 228 bp, Homo sapiens; identical to SEQ ID NO: 5182
  misc_feature (1)..(228): n=a,t,g or c

SEQ ID NO: 7610 - DNA, 315 bp, Homo sapiens
  misc_feature (1)..(315): n=a,t,g or c
tttatatttttattctttatttttaaaatttatgtatgttcgtgaggcacaagtgcaattctgctacattgatatcttgcttctcagtcccacacaaggaagctgtctcacactatagaganaatattcatgaacaaattcgtatcagtcacagtgagaggtaacactctaaatagcccatttcatgctcaagacatccaagtcaaagaaacccaatagcacagctgagtcccctctgttccccccccaacaccccactcacatcagggcccctgcctgggaggtgtcacctttattagctgtgaggagacaccc

SEQ ID NO: 7611 - DNA, 470 bp, Homo sapiens
  misc_feature (1)..(470): n=a,t,g or c
ttttggagagaaggataagcaatttattaaccccacgcccctagcaccagctgtcaccttggacttgttggagatgcaggggctagaaaggaaatgacagagtgtacaggccccttcgaccccgtgtcccataggtnggttggcccccagacacaccctctctgctggcagtgcagaacatgcatcccaataccctagaggagaaacaccaccccagggagagccctttctgctccaacctcctgggcaggtcccaggttggggcagcagcaatctgcaggtgtttgtcaggcctggccacacattgcggacagaggatacgactggggtaccctagggtgtggggagggtcggcctggggtcagggggcatgaaggctgtgttccagactcctcctgcccccaatcctctgtgcccctgctggagctctcctagcttctctgatctgtgctcctgtctttgggggaagc

SEQ ID NO: 7612 - DNA, 5985 bp, Homo sapiens
tcgtactgtcgcttaggccgacccgctcgcagcgacaaccagccctctacctcttttcgctctcccttaagtaataaaccgtctttccttatgacgagtcttaaactctttgggaggaataatgccggcgtcttccggaacccgacctcgccccgtgacctcagaggtatacttccgggacacggaagtgacccccgtcgctccgccctctcccactctctctttccggtgtggagtctggagacgacgtgcaggtaggagcccgggcgcgacaatcggggggcatctgcggcgaggggacctgtggggcttgggacgagagacgggggtctttccgtgggaaccgagctaggtgccgggcaagagacgcgcggctggcccacctggatcctggccaactcgggattgagttcattcctggtctcagaaggcccgttttgcttcagggaggagcttgtgaagtaagggtgagcgtggtccagccttttaagcctcggccccgcaatacggcggcacggccgcgtttgagctgcacagcgtagttgagggaacccgggacagacgtgggctcccgctctacctcgccaaacttttttcttggtgatcgcaggcccacgctaatctcgtttgtttcctcgtctgcaaaataggaataacaatagcaccgatcccatggtttgtagtgatcattcaaagaaggaaagcagggaaactctcgcactatgttggatgcttctaaatctggcgattctttgcgttgctgagtcgggcacgttgcaagttctggcgctcaggcccagcaccaatgtttgctgtcgcttgccctcgtttgatatactcctgatgaccactctgctcgttactttagggatgttagaacggagaaactgcaaattggcatttactgaatggccatcatgccgaaacatactcatgcttacgtatttgagatatgctggagcctttctatgcttctcgaggcagaactttgggcttctctcctgtggcgcgttccttacaatagttaacgcactgggtcgtgctcattggtctgatttgaagataggaacatttaacttcgtacacccaagacttacacttgaagtacttactgtggtcacacacttaactgaaagtttatatagggaaggcagaggagagatctaggaacacctgagacagactagggtaagttatttgtggtgtagaggcatcttgccactgtctttactgtgaccataggctgagacactctctatcttcaccatctgcaggatatcgattagtgttagtgtcttctgaaaatgttaaattgttctgaacaccaggaggttcagaaggcctgggctttaggcggaagcagtcttatcctagccttccactttctcattcattctcacccgccttcctcctgtcagtttctctctcccttagatcttgtgacagtatgattgcaattattatgcaaggtcataataggttagagttattttagtctcaggacccatcagatttctgagatgggtcttttccattagcctgccttttggatatattttagtgcctttgatatttgatgttggtgacaaagatttagttctaaatagttgtgggagtcaaatcagttgcatttttgaacattttgaagggatcaggtggagcacaggaaaacaggagatgagaggcttgagggctgtgttggtaagggacccttgaattctaagctgaggagttcatgcaggaatcaagcagctccctcgccccatgaaggtgttaggaatggtaccagtacatgggtagctgttggtcttgggtttcttcttgccttttggggtgcagccttcagcgatctgctgctagatccctaggcttctatcttgtaggtgctgtgagctgagctgttggtagtttctggggaaaggatacttctcatggtactttgccatatggccacagttgatacccccccaagtgcaaggagaaagaagttttagtgaggcagaaatgagagattacagtagagtattggatggagagtacagggacataagcaggactagggtttcatttaatagccagggaaagggatttctgaaatattttgtctgttaaccttatttcttttccttccactcagaaatggcacctcgaaaggggaaggaaaagaaggaagaacaggtcatcagcctcggacctcaggtggctgaaggagagaatgtatttggtgtctgccatatctttgcatccttcaatgacacttttgtccatgtcactgatctttctggcaagtgagtacctgggtggagaggcatccagctggcaaaaggctgaggaaggtaatggctgggacgggctagcagttcaggggattctctctaaagaaatccctgttttgtccaggtaagaaaatgtgcttgtccatttagcccacaaatattgtgatttcccaggggttacaagagaggagacacattcttcgtccttaacagcgtgatggtcattgaatccttggtttcttgggaattatcttctttccctagttccctttgcagagcagcatggactgcaatgggctctgggtgcgggttcgacggccatttagcaagttgtgacttgtgtgaaatcactcagattctgagttttggtttcctcatatgtaaaattaggacagtaatgtctaccttgtggagtaatggtaaggattaaatgcaaaagtagatatataaaatgttaatactgagtatagcttatattggccatcaaccccactgactaactccatagagagcccatgaccatcatcctccaccatgactgagctgtgttgctcttcactcattaggatatcgtaagcattccttgttggacgaggaagaaatgaccctgtgcttttgtccccagagaaaccatctgccgtgtgactggtgggatgaaggtaaaggcagaccgagatgaatcctcaccatatgctgctatgttggctgcccaggatgtggcccagaggtgcaaggagctgggtatcaccgccctacacatcaaactccgggccacaggaggaaataggtacgagtcgcagaggggatggctgggtggtagaaaacctgctgggcttgggtgctggagcacctggatttgaggtttgggttttttgttgtgaccttgaacaagatattttaggcatatacatacttaataattggctcctgtgtacaccagcagctcagtgttgagcaccactgtatactaggagctgtgtttcaggtactagaagagagtgatggggaaacagacatggtctctaccctccttgtgtgggaccgaggctggtgggagagtcagactttaaacaacagagctccagggagtatgtggttttcatttgtgacaaatgccaggaagcacaagtaaggagctggtgataaagtgtaatttaaactagggtctaaatgataagtccggagtccttccagtgaaataaggacaagaggaggtattccagctagagacaactgcagggaaaggtcttgaggtgggggtgaacctgggcactatgaaggaaagagtggcatgaggtgcagtcagaggggaagaggtggagtcctgtaggagaggggaaggacctggatttgagtgatgggggcatgaaagctaaatagatgactgttgcgtgaacaagccagacatggtcagaacataacaacaaaccatatggccccctcagcctaaaatatttactgtctggctttttttttttcctcttttttgagacagggtctcactctcacccaggctggagtgcagtggcgctatctcagcttactgcagtctctggctttcaggctctagcagtcctcccacctcagcctcccgagtagctgggactgctagtagtagtgccaccacgcctggctaaattgtgtatttttgtagagatggggtttcaccatgttgctcaggctggtcttgaactcctgagctgaagcagtccgccctgccttagcctcccaaggtgctgagattatgggtgtgaaccactgtgtacagccctgtctggctctttacagaaagtttgcagacctctgaactagcggggtgttgggatcttagaaagaagatcttccattacttgccaaaggctcttcttaacttaaaccttcattttctaggaccaagacccctggacctggggcccagtcggccctcagagcccttgcccgctcgggtatgaagatcgggcggattggtaagtgcccccctctagctaatgcttgggtttattttgaagcattggccccaaaaagcacgtgctgtcccagtggatgtgcagcggctggtctggtcacttttggcagttaagtttgttaagggaggctgcaagaggcaccttgtgacttaaaaatctctcccctgaatatctctgtcaccttgatatgcaatgtcctgtttcatttgtgaatctctgtcctacactgcctgtgcagtaaaactgacaagagatgaattgtcctttcctccattcttaggtcattgctattagcatttttgtgtgtaccatctcctgcattgtaggatgttcagcatttttggtttccgcctactaaatatcagttgggcatgccagtcgtgtgacagccaaaaatgaagtggggggtaccagcttctgttattaataccctcaggcctgtgatctcctggctccttacagctcttaggaagggaacagtagtctttccctgcacattgttctgtgcagttagtagcgacatacactgacgccccaggccaaagttcctactgtgtcctacttgaaggatgattttgttttcttgagacagtgtctggctctgttgcgtgggctggaattcagtggcacaatctcagctcactgtaaatttgcctcgtgggcggatctgtccaaaggatcctcccacctgcatctaccgagtagctgggacaacagtgtgtgccacacgggctttttttttttttttttgtagcggggagtttcaccatgttgcccaggttggtcccaaactcctggcctcaggcgttccaccagccttagtctcccaaagcccaaagtgctaggattacaggcatgacgcaccggcgcccagccttaaaagattttttcagactttttttcagtgtctttttacttaatgaaaacgagacagttgcagttaccctgtctagaagggttttttcctctagagaagacggtgggctagatgtcagaacctggatttgtcctgtgcctctgacatcttgcgcacagctcagcctgtttccctttctggaaagtgagttaagaccacgtcaggaaattcgaggaactggcagatggggccgcttcatgttcacatccatctgttaggtactggggagtcatttggggagcagcaggatctgttgctgattggttaggccattggtctagggagtcctgggggcccttcccatccagctccaggcaatgacgctttctcttcctccccacagaggatgtcacccccatcccctctgacagcactcgcaggaaggggggtcgccgtggtcgccgtctgtgaacaagattcctcaaaatattttctgttaataaattgccttcatgtaaactgtttcaactccagtcttctctccttcatcaggggctactcaggcattttgatttcttcctcctatttggcttcttggagaagagcctgagagagctgagatcctggtgctgcatttggggtcttttccatgctacttgcggcattaagttgccttggtcatctaaagcagaccaaggcgttggagacctcgttttgagtggagatgctggttctaaatatggaccaattcttaaagagccagagtgggaactgttgatccaagtgtagcctgaagcgaaagaggagccttccagacccatgccatatataaacacacgtgggtgtgcattctccccccacaccttctgtgcaaagctgggagctc

SEQ ID NO: 7613 - DNA, 408 bp, Homo sapiens
tttagagatggagtttgacttttgttgcccaggttggagtgcaatggtatgatttcggctcactgagacctccactttccaggttcaagtgattctcctgcttcagcctttgaagtagctgggattacaggtgcctggtaaatttttgtatttttagtaaagacagggcttcaccatgtcggtcaggctggtctcaaactcctgacctcaggtgatccaccggcctcagcctcccaaagtgctgggatcacaggcatgagccaccatgcctggctgcatcttacactttaatatccttactgttccataaaaaatgttttaaataatgcccacctaataaaagaatctctcatatctttggtgcagcaacaattggtcacatgctttcacatgtgaatatagcaggaa

SEQ ID NO: 7614 - DNA, 335 bp, Homo sapiens
aagcgaggtgagatgccggtggccgtgggtccctacggacagtcccagccaagctgcttcgaccgtgtcaaaatgggcttcgtgatgggttgcgccgtgggcatggcggccggggcgctcttcggcaccttttcctgtctcaggatcggaatgcggggtcgagagctgatgggcggcattgggaaaaccatgatgcagagtggcggcacctttggcacattcatggccattgggatgggcatccgatgctaaccatggttgccaactacatctgtcccttcccatcaatcccagcccatgtactaaaaaaaaaagtctttgagtaaaaaaaaaaa

SEQ ID NO: 7615 - DNA, 267 bp, Homo sapiens
  misc_feature (1)..(267): n=a,t,g or c
gcaatctttattctgcagagggacaatgaccacagatccatacaccacgtggagaccgaggggcggggagcagggncagtctttcaggggtgggcaggtccaggcggtgggcagagctcgggtgggtgaggggcagatgggcaggggctaaaaaaaagatgaaccacacagcaggggtgctgggagctgctccccacnctcccccatcccaccagccagcacccagagggncaacccttnacacgaccggcccaggatccacccagg

SEQ ID NO: 7616 - DNA, 333 bp, Homo sapiens
  misc_feature (1)..(333): n=a,t,g or c
ttttttttcttttcaataatgtctgacatttattgaaaataaggaaaagactttctccaggtagtgtattagagcagagcagaatgaggggttactgtgttgaacaaaaggcacacatcagagagacagttgcaaactcagaatactgcgttatgggcaaaactaactggtccacaagagaaaatgagagactcgatttggctgccaggaacacctgggcctaggcaagaacacaagaggtttctgggggtggggaggaaataggtctcgctgaaggtgacagatcccttggggggcggccagtngtctggatcactgtccagggactgtgtc

SEQ ID NO: 7617 - DNA, 1891 bp, Homo sapiens
ccgaggctataagagggcgcacaagtggcgcggcgcaggagccgccgccagtggagggccgggcgctgcggccgcggccggggcgggcgcagggccgagcggacgggggggcgcgggccccccgggaggccgcggccactcccccccgggccggcgcggcgggggaggcggaggatggaaacacccttctacggcgatgaggcgctgagcggcctgggcggcggcgccagtggcagcggcggcacgttcgcgtccccgggccgcttgttccccggggcgcccccgacggccgcggccggcagcatgatgaagaaggacgcgctgacgctgagcctgagtgagcaggtggcggcagcgctcaagcctgcgcccgcgcccgcctcctacccccctgccgccgacggcgcccccagcgcggcaccccccgacggcctgctcgcctctcccgacctggggctgctgaagctggcctcccccgagctcgagcgcctcatcatccagtccaacgggctggtcaccaccacgccgacgagctcacagttcctctaccccaaggtggcggccagcgaggagcaggagttcgccgagggcttcgtcaaggccctggaggatttacacaagcagaaccagctcggcgcgggccgggccgctgccgccgccgccgccgccgccggggggccctcgggcacggccacgggctccgcgccccccggcgagctggccccggcggcggccgcgcccgaagcgcctgtctacgcgaacctgagcagctacgcgggcggcgccgggggcgcggggggcgccgcgacggtcgccttcgctgccgaacctgtgcccttcccgccgccgccacccccaggcgcgttggggccgccgcgcctggctgcgctcaaggacgagccacagacggtgcccgacgtgccgagcttcggcgagagcccgccgttgtcgcccatcgacatggacacgcaggagcgcatcaaggcggagcgcaagcggctgcgcaaccgcatcgccgcctccaagtgccgcaagcgcaagctggagcgcatctcgcgcctggaagagaaagtgaagaccctcaagagtcagaacacggagctggcgtccacggcgagcctgctgcgcgagcaggtggcgcagctcaagcagaaagtcctcagccacgtcaacagcggctgccagctgctgccccagcaccaggtcccggcgtactgagtcgggcatggcggccacctccaaggggcgggctcgcgggggggtgtcgtgggcgccccggacttggagagggtgcggccctccacccccccctccccgagtgtgcccaggaactcagagaggcgcggccccggggattcccccccgaggtgcccaggactcggaaggggcgccccggactcgacaagctggaccccctgctcccgggggcgagcgcatgacccccccgccctcgcgctgcctctttcccccgcgcggccgccccgtgttgcacaaacccgcgcgtctcggctgcccctttgtacaccgcgccgcaagggggctccgagggggcgcacgtcaaaccctgcctttcctttacttttactttttttttttctttggaagagagaagaacagagtgttcgattctgccctatttatgtttctactcggggaacaaacgttggttgtgtgtgtgtgtgttttcttgtgttggttttttaaagaaatgggaagaagaaaaaaaaattctccgcccctttcctcgatctcgctcccccttcggtctttcgaccgtccccccctcccctttttttgttctgttttgttttgttttgctacgagtccacattcctgtttgtaatccttggttcgcccggttttctgttttcagtaaagtctcgttacgcca

SEQ ID NO: 7618 - DNA, 285 bp, Homo sapiens
  misc_feature (1)..(285): n=a,t,g or c
acttgggaaccagctttatttctgatttttttttttttatcagagtataaaaaagtgagtgcagcaaaacaaggaagacgagacaggcgtgcgtgggccagggcaagacagaggagaagggagggaagcagaggcagaagggccccttgggcgaaggctgatggtgggaggcgggcagaatacttgcgcancacacaggggcagggntgagggtctccccgtggtgggggcttacaggatgggagcggccaggccatttgtncaaattccacctgggacctgcag

SEQ ID NO: 7619 - DNA, 254 bp, Homo sapiens
  misc_feature (1)..(254): n=a,t,g or c
cagcagacacagacacagatgtttattccaggaagaggtctaagaaacgagcttcttagagcatgtgtcacggggcagccagtcctggggctctcagagcagccccctcccttcagcagctgaagcaatagcgcccccattttacaggcggnatggaagccagagaggtgggtnggggagggggtccttccctggctcaggcagatgggaagatgaggaagccgctgaagacgctgtcggcctcagagccctgg

SEQ ID NO: 7620 - DNA, 476 bp, Homo sapiens
ggttggttgctgccgaaatgggcaagttcatgaaacctgggaaggtggtgcttgtcctggctggacgctactccggacgcaaagctgtcatcgtgaagaacattgatgatggcacctcagatcgcccctacagccatgctctggtggctggaattgaccgctacccccgcaaagtgacagctgccatgggcaagaagaagatcgccaagagatcaaagataaaatcttttgtgaaagtgtataactacaatcacctaatgcccacaaggtactctgtggatatccccttggacaaaactgtcgtcaataaggatgtcttcagagatcctgctcttaaacgcaaggcccgacgggaggccaaggtcaagtttgaagagagatacaagacaggcaagaacaagtggttcttccagaaactgcggttttagatgctttgttttgatcattaaaaattataaagaaaaaaaaaaaaaaaa

SEQ ID NO: 7621 - DNA, 395 bp, Homo sapiens
tttttccatgggatgagtttttaatgtgaggcaaaatcagtccacaatacaaaatctaaaaatcacacccacttttcccacctggctcccggggaggggggaagctgggggtttcttttgcctgcagggtgtggggaggagcagaggagggccaagaaagggagaaggaaacagaggccacagaggcctggctggaggtctcctgctgccccctgccctgtcctggagctgcccttggcctcctgtgccctctaccggtgcacgcctgtgtgggcccagcccccatctgtctggtctggccctgagaggctcgggcaccagctgcatcatttctctttcttctccagccccttcgatgctgatgcctctgttccctctttggattctgtcactgc

SEQ ID NO: 7622 - DNA, 98 bp, Homo sapiens
tttttcactaaagggccaagctttattgttctttagttctgtccccctcctgctgccccaggagtagggctggctgaggctctgggcccagatcctgg

SEQ ID NO: 7623 - DNA, 332 bp, Homo sapiens
acagtctagtgtttattttatgttatggaaggtacacttgaatttcaaaaatttaaaacatatataaaaagtggttagggactaacatttgtatcaacagttgataaatgtctaagattgtttattatacagcagggtacaatggtagtgctaatgccaacagggcaccatggaagttagtctaaaaattatcgctaggctttatacaagcaacaacatatgctgctgctcttagaattttgggaaatgatctgcttctaatactaagcagttctttaacatttttaaatgttatacagtgttacagtatttagtttggcaaatgtttcaaa

SEQ ID NO: 7624 - DNA, 194 bp, Homo sapiens
tttttttttttttcccactagaacagaaataaattttaattcattgaaaagtgcagcagtgaacagggtccttttgaagggcactttctaagtcaaatgactgagatgacacagagcaagggcagaataggaacagaggatgcaaacacaggaagttacaaaattcagtgggaactaagtggtggtaaaactcc

SEQ ID NO: 7625 - DNA, 246 bp, Homo sapiens
gagctcccgtgagtggttaatagggtgatagacctgtgatccatcgtgatgtcttatttaaggggaacgtgtgggctatttaggctttatgaccctgaagtaggaaccagatgtcggatacagttcactttagctacccccaagtgttatgggcccggagcgaggagagtagcactcttgtgcgtgatattgatttcacggaggatggtggtcaagggacccctatctgaggggggtcatccatgg

SEQ ID NO: 7626 - DNA, 698 bp, Homo sapiens
ttttcctttcgctgctgcggccgcagccatgagtatgctcaggcttcagaagaggctcgcctctagtgtcctccgctgtggcaagaagaaggtctggttagaccccaatgagaccaatgaaatcgccaatgccaactcccgtcagcagatccggaagctcatcaaagatgggctgatcatccgcaagcctgtgacggtccattcccgggctcgatgccggaaaaacaccttggcccgccggaagggcaggcacatgggcataggtaagcggaagggtacagccaatgcccgaatgccagagaaggtcacatggatgaggagaatgaggattttgcgccggctgctcagaagataccgtgaatctaagaagatcgatcgccacatgtatcacagcctgtacctgaaggtgaaggggaatgtgttcaaaaacaagcggattctcatggaacacatccacaagctgaaggcagacaaggcccgcaagaagctcctggctgaccaggctgaggcccgcaggtctaagaccaaggaagcacgcaagcgccgtgaagagcgcctccaggccaagaaggaggagatcatcaagactttatccaaggaggaagagaccaagaaataaaacctcccactttgtctgtacatactggcctctgtgattacatagatcagccattaaaataaaacaagccttaatctgc

SEQ ID NO: 7627 - DNA, 285 bp, Homo sapiens
  misc_feature (1)..(285): n=a,t,g or c
gaaaagcaacttttattgaagaatttggagggaaggttccatattatattataatagtaaaaatactaaagttgaatgttgtaaaaaaacgccgtggtgcagcggcantcnagcgtnctnggccaggaggcgtggaggggcccagggatggccacccccacaggagtcagggagggcctgggngacacggaaaggttaagcgtcgaaaaggtcaagtgctaccgtggagagatcatctganggggaggctcccggtggacagtcaccaagaactgtgacacagcg

SEQ ID NO: 7628 - DNA, 433 bp, Homo sapiens
ttttggcagcggggagagggaaagaggaggaaatggggtgtgatgggtcaaaggcaggaaaggtaagccatggtcctcaaaccaaagagccctctctgtaggtcctctgatctttgagtgtgagctcaagctctccagtggacacagaaaaaggcctggtagtaagtggtttgcattgtgaggtatgaggatccctggtaaattcagcagcatgtggtttttggaaatcagcccacaagataagaacactgcaaccaaactcataactaatactgctaatttaactattgtccaaaagagaaagggaagaagaaaaaaatccccactctactgggaggttctaggctttcctataagttatccaaatagtctttttttaatctcagggtttcttaagagaattcccattcagtgaccatttctttcgttaaag

SEQ ID NO: 7629 - DNA, 385 bp, Homo sapiens
  misc_feature (1)..(385): n=a,t,g or c
ttttgcatcaacatttttattgaaatacaaaaagtgcaaacggtgaaatacatgattggtgccaaggaagtcattaagtgtgaatgtgaacactggattcacacagtacaagcacccgctccctggggtacagaccantgggggacatgagaaanaccaaatagatccgaaaggctccccaggngaatgnnggctcgtgagcgacacttgatnnacaaaggagggcggagagcangancaagccctggncgaggctnngagaccaatgggactgactgnagaaccagcagcagcccaggccccaggggctgggaatgcactgctgattggtcttgggagagcccagcgaaagttatgcccaggcccagcctggctttgccggatt

SEQ ID NO: 7630 - DNA, 435 bp, Homo sapiens
tttttggttataaaagcccttttataaagccatttttaaacaaaacaaaaaaaaagtttacaaaagaaaaaaagatacagaaaaagaataacttgcttcatatgtcccaaaaagagaaaaaaataaaggggacaatgccaacatgctcaacaataaaggcttctttttcttatttttttaatacaaaatacaagcaaaggatacacatacttaaaacagagctcaggagcagacacgcagtcctggaaacccttcaataaaagcaaagcaggagtttgttttttctttgtctatgcagatacatacagagactgggatatgtaaaaattaagtatcacaaaagaccatcacacgattctaccaatgcatgttgcatctgtaattcacgaacatggtcaacaaatcatgttcacttcaaccccatttcatttaaat

SEQ ID NO: 7631 - DNA, 3196 bp, Homo sapiens; identical to SEQ ID NO: 716

SEQ ID NO: 7632 - DNA, 397 bp, Homo sapiens; identical to SEQ ID NO: 1828

SEQ ID NO: 7633 - DNA, 245 bp, Homo sapiens
  misc_feature (1)..(245): n=a,t,g or c
ctttttaattgtttaactttattactgttgcaccatttatacaattacatataattbcaatgcatccattgtacatttbbbbgtttttbtyttgtttttyttttccattttccaatgagtggtgtgttggkgtctgtsacacagaatggaagagaaactggaactgcaatgaacgsagactttytyycyyttttttttcatttccactgaccaataaacagaactacaggtgcacccahccangg

SEQ ID NO: 7634 - DNA, 476 bp, Homo sapiens
  misc_feature (1)..(476): n=a,t,g or c
ttttttttttttgaatcagtcaattttattccaattcttcacaatttacactcaatatgttgtttccaaaatgtaagtcaccctttatataatagttttattatttcatctttcttttagagtttttttaaaatctttnccttatgtttcttcagtagaagccagantcttgagttgcccagttaggagcctctgacctgctattgtcattaagtttcttctcaatattcatggccaaaatctagcttctaaaagaaaggcttttggtcttttcaatcacttgctgatagggtgagagtacattgttaccataaccacatgacctaatttaggaatcaatcttgggcatccagtcttggcatttctaatcacatttacaatccacctttcaggtttcatcgggagtcatgttcaatttgtctgccaacatgttaatgctgatacacggggggntgtgacggaagncccaatttgga

SEQ ID NO: 7635 - DNA, 292 bp, Homo sapiens
  misc_feature (1)..(292): n=a,t,g or c
acacannnnggtttthgtttattaatgttcttgcgraaaatccacagtggccacagctaacatcatygcagcacctttactccttcggctgtgatccaatchccagctcactttthgccagcaccaacathggcctttgcagtccccctgactttcttcattchgttcthgcgttcctttcgttgctttcthgaggtctttttcttctcatacagggcatgtcttgcaagtctatgtthgggttcatttttctthgcataatccmgggaatcataaatcatgccaaagccag

SEQ ID NO: 7636 - DNA, 349 bp, Homo sapiens; identical to SEQ ID NO: 5084

SEQ ID NO: 7637 - DNA, 331 bp, Homo sapiens
  misc_feature (1)..(331): n=a,t,g or c
tttattaaacttgtacattttactttccttctttcagaatgctaataaaaaacttttgtttatacttaaaaaaaccataaatcagacaaacaaaagaaacgattccaacatcacttctgtgatgagaaaagaggcaatggaattcaacataagcaaagaaaactctacctggaggaaagaaatcgatcagcgaggaaacaactcggggctgctgcagaactgcaggccatgcgaggaggagcctcctagaggatttccaaagcaaacccatccctgccagaccaggaaggcagccgtcctanctcccagagnaacagacctcagccctaat

SEQ ID NO: 7638 - DNA, 1044 bp, Homo sapiens; identical to SEQ ID NO: 702
  misc_feature (1)..(1044): n=a,t,g or c

SEQ ID NO: 7639 - DNA, 274 bp, Homo sapiens
  misc_feature (1)..(274): n=a,t,g or c
aaaactaagtcagatttttatttttttttccatagaccacatcatttaataataaaaaaaataaaaataaaahttgaacaaaaggaaaaggtggatataaagtggaacctgtgggaaagaggcaagggnhgcaggacagaagagacnsgggaactygcaggggccctgggactcaggrggagatgctgattmcabctvcataggtgacccagtcctggccccggytgttcccaagagaaggytdtaagtacccaggggggtggwaagcagatgg

SEQ ID NO: 7640 - DNA, 398 bp, Homo sapiens
  misc_feature (1)..(398): n=a,t,g or c
aagaatctaaagtgtggattttattccattgcacaatttgctagtgtatttcctgggtagtgtggtgctgaataaataggagtnnnnnnntggggtggggtgggtaagggattcagataagccagaagcagggtgatttttagttggaattgtaaactttagtcagcccccacacgctgctggggaatgtggaatgttctagctctgagatgttaactgagaaaagagaagtcaaacaaagccgatacgtgcagccctgtctacagaatccttcattatccagtttaatcaggagtttcttggtcttttattaacttggtcccaaagaaggaattcaagtcctagataagtaaatcctcaatttgctgttccctgaagtatggaaatgaagttgggcc

SEQ ID NO: 7641 - DNA, 529 bp, Homo sapiens
ttttttttttttttttccatgtggcattttatttgtaaatatatgtattacatccctagaaaaagaatcccaggattttccctcctgtgtgttttcgtcttgcttcttcatggtccatgatgccagctgaggttgtcagtacaatgaaaccaaactggcgggatggaagcagattattctgccatttttccaggtctttgagttgcacgtcaaatctggggctgatcaccccacacttgtttagcctgcctgtgaggttcacaacaattttcccagctctgtggtcatcaatgatttcaaattcgccaatgtaaccatgcttcatcatcacagtgagaaccggacgatgactttggagccggcctaataagcacctgcgtttgcctctcttttcggcattgttgatactcttgagagcatctgccaggacattcatgcgcaccattgtggcttagattgcaggatggcgcgatggcagacggatgaaattggagctctcagagagtgctactcaccggggggggaattc

SEQ ID NO: 7642 - DNA, 412 bp, Homo sapiens; identical to SEQ ID NO: 800

SEQ ID NO: 7643 - DNA, 329 bp, Homo sapiens
  misc_feature (1)..(329): n=a,t,g or c
gctgctgcatcggttttattcctcatgggtagatgaacacacactggtatatggggaaatcctcacccgccctccgctgctcttctggaggtctgtcctcttgctttcctcctctgccccagcctggtgctgccccaagccctgccctggcaaagagagaactgtgcacagcggggaggctctccaagccagagnctcgcacgcagctgaggaatgacgcaggggcctgcaggaagctcacgcggagacaggtctgtggggccccgcgtcagaacccacttcacatcccaaaagncccanctgcttttgatctttcaatgntggggttc

SEQ ID NO: 7644 - DNA, 712 bp, Homo sapiens
ttctttctttgctgcgtctacctgcgagaatgaagactattctcagcaatcagactgtcgagattccagaaaatgtcgacattactctgaagggacgcacagttatcgtgaagggccccagaggaaccctgcggagggacttcaatcacatcaatgtagaactcagccttcttggaaagaaaaaaaagaggctccgggttgacaaatggtggggtaacagaaaggaactggctaccgttcggactatttgtagtcatgtacagaacatgatcaagggtgttacactgggcttccgttacaagatgaggtctgtgtatgctcacttccccatcaacgttgttatccaggagaatgggtctcttgttgaaatccgaaatttcttgggtgaaaaatacatccgcagggttcggatgagaccaggtgttgcttgttcagtatctcaagcccagaaagatgaattaatccttgaaggaaatgacattgagcttgtttcaaattcagcggctttgattcagcaagccacaacagttaaaaacaaggatatcaggaaatttttggatggtatctatgtctctgaaaaaggaactgttcagcaggctgatgaataagatctaagagttacctggctacagaaagaagatgccagatgacacttaagacctacttgtgatatttaaatgatgcaataaaagacctattgatttggaccttc

SEQ ID NO: 7645 - DNA, 421 bp, Homo sapiens
tttttttttttttttttttaacacagcactgagttttattagggatttcattaaggttaaatttctaggaatgagggagtcctagttagaggacccaaaagcccacgaagcctcctcagatctcatagtgaaccacccgctctggttctttggagggatcaccgcctcgttccaggtacagattattgtaaggatactgctttggtcccacaggctggtagacagggtacacgtcccccacccagcacatgaatatcatgaaagccaggaaaccgaagagctgcatacacatgacatgccaagaaacaggtgtgggggatgtatccacacggttcctgttgtacatgtctaggtgccagtgcatcggttcaccccagttcaacctcaggcccggctggtcccagctataccatgggatctc

SEQ ID NO: 7646 - DNA, 219 bp, Homo sapiens
tttgggatctcagaaaggtttattatcaactgaaggaggtaacatgtagcctttgctggggacaaagatgtgacaagtctctgccccatcctaggtgctgccctgcgtagggatcttcccaggcccgccccccttgggaagcctggtagcgctgggctggcgtggaatcctctggctggatccctcgtggttgctgggttcccgccagggccaatactc

SEQ ID NO: 7647 - DNA, 1305 bp, Homo sapiens
ttttcttttgacttgtttgtggatggaatgtttacagacatttctaattactgctttaattaaataaattggatcaaaggccgttcgaggtatttttgttttgccgtttgtcgctcagaattggcattttgagaggtgattgatactgctaacaattttctagtactctagtttgtttcaagaagagattttgggtagacgtaatcttcacctttcaaattatataacaatacgaacattattttttatactgatcataatttccagatttggggagggggtgatcgtggcaggaaaagttgtatgtttgttagttgcatatggtgatttttgatttttcaatgctggtaggtaagtaaggaggtctctgtaccatggctcgtacaaagcagactgcccgcaaatcgaccggtggtaaagcacccaggaagcaactggctacaaaagccgctcgcaagagtgcgccctctactggaggggtgaagaaacctcatcgttacaggcctggtactgtggcgctccgtgaaattagacgttatcagaagtccactgaacttctgattcgcaaacttcccttccagcgtctggtgcgagaaattgctcaggactttaaaacagatctgcgcttccagagcgcagctatcggtgctttgcaggaggcaagtgaggcctatctggttggcctttttgaagacaccaacctgtgtgctatccatgccaaacgtgtaacaattatgccaaaagacatccagctagcacgccgcatacgtggagaacgtgcttaagaatccactatgatgggaaacatttcattctcaaaaaaaaaaaaaaaatttctcttcttcctgttattggtagttctgaacgttagatattttttttccatggggtcaaaggtacctaagtatatgattgcgagtggaaaaataggggacagaaatcaggtattggcagtttttccattttcatttgtgtgtgaatttttaatataaatgcggagacgtaaagcattaatgcaagttaaaatgtttcagtgaacaagtttcagcggttcaactttataataattataaataaacctgttaaatttttctggacaatgccagcatttggatttctttaaaacaagtaaatttcttattgatggcaactaaatggtgtttgtagcatttttatcatacagtagattccatccattcactatacttttctaactgagttgtcctacatgcaagtacatgtttttaatgttgtctgtcttctgtgctgttcctgtaagtttgctattaaaatacattaaactat

SEQ ID NO: 7648 - DNA, 223 bp, Homo sapiens; identical to SEQ ID NO: 1744
  misc_feature (1)..(223): n=a,t,g or c

SEQ ID NO: 7649 - DNA, 358 bp, Homo sapiens; identical to SEQ ID NO: 542

SEQ ID NO: 7650 - DNA, 349 bp, Homo sapiens
  misc_feature (1)..(349): n=a,t,g or c
tttnggcagatggagggccttttattcgcgagggtcgggggtgggggtcctaggtggggacagacaataaataccgaggaatgtcggggtctcagtgcatccaaaacgtggattggggttgttgggggtcctgtagcctgtcagcgagtcggaggacgaggtcaataaatatccaaaccgccgaagcgggcggagccggctggggctccgagagcagcgcaagtgaggaggggggcgcggtatccccgaaaaagcgggtttggcaaaagcaaatttcccgagtaagcaggcagagatcgcgccagacgctccccagagcagggcgtcaatacacaagaaagctttgcac

SEQ ID NO: 7651 - DNA, 540 bp, Homo sapiens
cttttcgatccgccatctgcggtggagccgcaaccaaaatgcagattttcgtgaaaacccttacggggaagaccatcaccctcgaggttgaaccctcggatacgatagaaaatgtaaaggccaagatccaggataaggaaggaattcctcctgatcagcagagactgatctttgctggcaagcagctagaagatggacgtactttgtctgactacaatattcaaaaggagtctactcttcatcttgtgttgagacttcgtggtggtgctaagaaaaggaagaagaagtcttacaccactcccaagaagaataagcacaagagaaagaaggttaagctggctgtcctgaaatattataaggtggatgagaatggcaaaattagtcgccttcgtcgagagtgcccttctgatgaatgtggtgctggggtgtttatggcaagtcactttgacagacattattgtggcaaatgttgtctgacttactgtttcaacaaaccagaagacaagtaactgtatgagttaataaaagacatgaactaac

SEQ ID NO: 7652 - DNA, 591 bp, Homo sapiens
atggcgcaggatcaaggtgaaaaggagaaccccatgcgggaacttcgcatccgcaaactctgtctcaacatctgtgttggggagagtggaggcagactgacgcgagcagccaaggtgttggagcagctcacagggcagacccctgtgttttccaaagctagatacactgtcagatcctttggcatccggagaaatgaaaagattgctgtccactgcgcagttcgaggggccaaggcagaagaaatcttggagaagggtctaaaggtgcgggagttggagttaagaaaaaacaacttctcagatactggaaactttggttttgggatccaggaacacattgatctgggtatcgaatatgacccaagcattggtatctacggcctggacttctatgtggtgctgggtaggccaggtttcagcatcgcagacaagaagcgcaggacaggctgcattggggccaaacacagaatcagcaaagaggaggccatgcgctggttccagcagaagtatgatgggatcatccttcctggcaaataaattcccgtttccatccaaaagagcaataaaaagttttcagtgaaatgtgcaaaa

SEQ ID NO: 7653 - DNA, 170 bp, Homo sapiens
tttggtcttcactggtctttattgaatgagggttgtcaggagcaaaggtgggatcaagagcagcaaaagcagaaacaagtataaaagtatcaaaaattcaaagtgctacaatgaggaaagtgagaagggttgggttgtggcccagagggacctctgggacacaggattga

SEQ ID NO: 7654 - DNA, 407 bp, Homo sapiens
  misc_feature (1)..(407): n=a,t,g or c
atccccaaagcagcatttatttacccattgaattccaaaacatttattttagaagtctggcatttcataatcacccatcttgattgacatgggctgacacacatggcgctgtcaggatacacaaggacaatagccaaagagttacaaaaaataaatccatgattcttaaacaattgcaaccaaaaaaaaaaaaaangttacaagtntcaaanctttcagatgcattgcattgaaanganggtttgtgcacgtcataatttaanggggcaaanccaaggggctactgaaacctcacgttaancagtttattataanggctgatgggnaagggggcaagttgtctctctgtatcaggtttccctttaacagttttccntttaattgaagggaagaggtggggagggggt

SEQ ID NO: 7655 - DNA, 302 bp, Homo sapiens
tttgagcaaacgtacaaaggttccaagggacaggaccaagaacgaggggctgagacatttacaacagcaggcattttctcttcctcttcttcacgggaggcgggcagaggactgctcggatcgcttcgtcaaacactgtcttgaggcctcgctgtgtgagcgccgagcactccaggtattttacagcaccaatctccttagccatggctagaccctgcggataggtgatgggagtcagcttcttctccttcagtttctcgatcgtgtctttatcatccctaagatcaagtttagttcccact

SEQ ID NO: 7656 - DNA, 315 bp, Homo sapiens; identical to SEQ ID NO: 1928
  misc_feature (1)..(315): n=a,t,g or c

SEQ ID NO: 7657 - DNA, 280 bp, Homo sapiens; identical to SEQ ID NO: 5149
  misc_feature (1)..(280): n=a,t,g or c

SEQ ID NO: 7658 - DNA, 327 bp, Homo sapiens
  misc_feature (1)..(327): n=a,t,g or c
aatgattaatagatgatttatttaggcaggaatacatatagtcatcattgccagacttaatatgagaggtgaaatgttcgatccaatttcccttcctggataagtttttctttcctatcctgtaaagacagaaaaaaagtacattaaagacaatatattctgccagtnggctatattagataaaaataaataaataaaaaaggtaagaaaaactgcattttggcacaacccaccatacaactgacaaacagaatgaaacactccaaacctaattgcaatcccactgtctaaagcccagggagtgtgcgaagaaacagtaatccgagg

SEQ ID NO: 7659 - DNA, 323 bp, Homo sapiens
  misc_feature (1)..(323): n=a,t,g or c
catggcaatcttttattacttatttttnatttcattccatgttggaagcaaagtcatatctattaaaaagtaaaaccacaaattagtctttgattattcagangcataagangattgctgttttcatgttttccatttttccctccagtggcttgaaaagtacagatgctcttttcagtcatgttttgtcttaaagattttaaaataggaggagtctgcatccacaccactcttaaagttctcaatccttttcttccccatcttgttgggntatccaccgggnccgggntgggcatgtattgccacaaatatggttactanca

SEQ ID NO: 7660 - DNA, 329 bp, Homo sapiens
agtaaacaacctagtcttttatttgcccaaggccggctgttgcaagcactgaggccccaagacttccagaagggaaggggaggaggggcaaacactgtgcctaccaggtgctgcctgccccgtcctgcttcctgcaggaggtgggaagggagagaaaacggacattcgcgccatcaagtatctccccagttttcagccactatattcagttgtggaggaggaaactgaggcacacgcatccccccaggcttctacttgctagtccaaggtttaacttactccctcccctcatctctacccccagcagaatgagctgtaagcagcctggg

SEQ ID NO: 7661 - DNA, 468 bp, Homo sapiens
  misc_feature (1)..(468): n=a,t,g or c
tttaggggtctggctttctctttagttctcatcacactagggctctcagtcacagagaaggcacttaaatgggaaggccacctgatgcaggccaaccatattcaccccccgcccacccgctctgggggaggggagcacaacgacatcaccacttgacatcccccttggcactggtatgtgggtccccttaaccgttagaccctggggagagcccaaggccttgacctccggaatcgccatgttaggaggaggggcttcagaaacagttggaaggcaggatatcctgggagctgcccccagccagcaggggatcaggcagggggctgtaggagatgggttggcacaggggaaggggacagcttggtcgggctttcctgggagattccccaaaccccacagaaggtcccacctcctacagattccccaaaaggcaccggttaaaggatgggcaaagaggcacttgattnt

SEQ ID NO: 7662 - DNA, 390 bp, Homo sapiens
gcaaaataagcgtgttataaaatttatttgtgtaagcattcagacatttttaggtgggaaagatgatatgcagaatccactacaaggtgcaacagaaaatcgtattggaaaggacggtacatctggcgcagaccagcagtggcacgattccaaacaaatgtcagacgagagcgcttcatggggagaaactgaaaattataatttaaagcttcatgaggcaagatatgttccaatttaaaacactaagaaatagtaccatcgatgaaaaaggaaatcaacctccaggtgtaccaaaaggggcgtagggcaaacggggaaaatttgcatttgttgaggtacaaataaggagtgttctgtaagagaggggcattaattattaatgacaaaccc

SEQ ID NO: 7663 - DNA, 381 bp, Homo sapiens
  misc_feature (1)..(381): n=a,t,g or c
ttttattaaaaaaaaaaaaacccacattttttttnattggnnagtnttggaaggantttntnanaaangtnagcccatgggcctttggantttnaggggagtgggtccgntccaccagatgccagcaccggggccagtgcagctcagagccctgtggcgnactacagggcctgcacagacggtcactcaaagaaagatgtccctgtgccctactccttggcgatggcaaagggcttctccacctcgatcttgccgcagtctgcgatgatcanatccttnaggggtttatcccgggctgtctgtcttgggtgctctccaccttccgnaccacctccatgccctctagaactttgccaaacaccacatgcttgccatttaggc

SEQ ID NO: 7664 - DNA, 375 bp, Homo sapiens; identical to SEQ ID NO: 728
  misc_feature (1)..(375): n=a,t,g or c

SEQ ID NO: 7665 - DNA, 219 bp, Homo sapiens
  misc_feature (1)..(219): n=a,t,g or c
acaaataaacggggcttttattgtgtgtccacaaaaacaaagtcagggtggcctttggttaatcccctccccccaacaagatgacaaaaggaggaatgcatgtcaacaaaatgacaaagaggaccatggaggggcctgagtnnnnntgcctccctggtgggacaaggcaggggagcaagcactactcttgggcttagggccagcggccccccaagcaaa

SEQ ID NO: 7666 - DNA, 99 bp, Homo sapiens
aatgcaggaagcatttattgagggccagagctgcattctacaagaggcaagaggcaggacacaggcaatctctagtgggttagaggagaggttggggag

SEQ ID NO: 7667 - DNA, 269 bp, Homo sapiens; identical to SEQ ID NO: 913

SEQ ID NO: 7668 - DNA, 630 bp, Homo sapiens
gcaggaggcgccatcatgggagtggacatccgccataacaaggaccgaaaggttcggcgcaaggagcccaagagccaggatatctacctgaggctgttggtcaagttatacaggtttctggccagaagaaccaactccacattcaaccaggttgtgttgaagaggttgtttatgagtcgcaccaaccggccgcctctgtccctttcccggatgatccggaagatgaagcttcctggccgggaaaacaagacggccgtggttgtggggaccataactgatgatgtgcgggttcaggaggtacccaaactgaaggtatgtgcactgcgcgtgaccagccgggcccgcagccgcatcctcagggcagggggcaagatcctcactttcgaccagctggccctggactcccctaagggctgtggcactgtcctgctctccggtcctcgcaagggccgagaggtgtaccggcatttcggcaaggccccaggaaccccgcacagccacaccaaaccctacgtccgctccaagggccggaagttcgagcgtgccagaggccgacgggccagccgaggctacaaaaactaaccctggatcctactctcttattaaaaagatttttgctgacaaaaaaaa

SEQ ID NO: 7669 - DNA, 233 bp, Homo sapiens
cagccatggctcgtggtcccaagaagcatctgaagcgggtggcagctccaaagcattggatgctggataaattgaccggtgtgtttgctcctcgtccatccaccggtccccacaagttgagagagtgtctccccctcatcattttcctgaggaacagacttaagtatgccctggacaggagatgaagtaaagaagatttgcatgcagcggttcattaaaatcgatggcaaggt

SEQ ID NO: 7670 - DNA, 412 bp, Homo sapiens
  misc_feature (1)..(412): n=a,t,g or c
caggtttattttcacattgtttaattttatgtacatttcacatatcataaatacacacaatacaaaaagctatacaaaaaccctactaattcaacatttaaaaaagggagagggagatactgcatttgatttctgacacttttctgtttaaataatacttaaattcagttttcaagaagacaacaaattgaaaatcattaatttttcagagggctttgtgttcacataaattcatcattcaggctgggcatggtggctcacacctgtaatcccagcaagttgggaggctgaggcaggtggatcacctgaggtcaggagttcgagaccagcctgggccaacatggcaaaaccccatctctaaataaaaacaaaacaaaacntaagatagattcatcattccaggtatattttt

SEQ ID NO: 7671 - DNA, 407 bp, Homo sapiens
  misc_feature (1)..(407): n=a,t,g or c
aattttaattttatttttttacaatgtaccatgaacatcttttccatgcacatgggtgaaaatcctctactaaaatatagagcgccgtagttgggtcaaaaggctgctggtaacgagactgacatctaaagcaaagtatcagcttaaggttaaagcattgggcctggcaaatacctaccagggaaagcagggccagcantattctcatcagagaantcagattgganggccaaagnnttaaaggtatgggttatcgtgtaagcccctctggcccctacctccacccctcactcccctgacaccccgttgtccccttggggcgnattggttcctgtacatctctttgccatccnatganaaccacccnttttctgtttttnccttagctcctcttgagcccttgncac

SEQ ID NO: 7672 - DNA, 405 bp, Homo sapiens
  misc_feature (1)..(405): n=a,t,g or c
acaagtctttaattaaaaaactcaacaaaaatatataattgagcattttacataatgcatacattcttaatatctgcaggtaagataaacaacagaaggcaaaagcagatatgctgtattgcttctttggcaactcaccaatatcatcccctgcagaaacagagtttttttttttttttttaaatccatggtcttaaaataattgtcccttagtataaacaaaatatttagcaataatacagtagacggattcttcaaattcacaacaatttataatactttataccacaagggtaaactagtaagctgctttctaaaattaaggcagcagcagtgtttagagggggagtaaaaaaaaaaaaaaagncatcccttttcnagttatatcctggctctgccttcttt

SEQ ID NO: 7673 - DNA, 350 bp, Homo sapiens
  misc_feature (1)..(350): n=a,t,g or c
nccttacccttgtctccacccctttgtaattttatttatgtatttntttgaagacagggttcactctgtcccctaggctggagtgcagtgacacaaacacagctcactgcagcctcaacttcctgagctcaaacgatctttctaccttagccttccacctcggcctcccaagtagttgggaccacaggttcacgccaccatgtccagctaattattttgttgttgtatttttttataggagagggaaggtctcactntgttgcccggggtaggtctcaaactccgggggctcaaggtggatccccccatccccaccacccaaaggtgctggggaataggatacattttaa

SEQ ID NO: 7674 - DNA, 530 bp, Homo sapiens
cgctctcctttcgttgcctgatcgccgccatcatgggtcgcatgcatgctcccgggaagggcctgtcccagtcggctttaccctatcgacgcagcgtccccacttggttgaagttgacatctgacgacgtgaaggagcagatttacaaactggccaagaagggccttactccttcacagatcggtgtaatcctgagagattcacatggtgttgcacaagtacgttttgtgacaggcaataaaattttaagaattcttaagtctaagggacttgctcctgatcttcctgaagatctctaccatttaattaagaaagcagttgctgttcgaaagcatcttgagaggaacagaaaggataaggatgctaaattccgtctgattctaatagagagccggattcaccgtttggctcgatattataagaccaagcgagtcctccctcccaattggaaatatgaatcatctacagcctctgccctggtcgcataaatttgtctgtgtactcaagcaataaaatgattgtttaacgta

SEQ ID NO: 7675 - DNA, 158 bp, Homo sapiens
  misc_feature (1)..(158): n=a,t,g or c
aaaattttaaatctttaatttccgttttcacgtattttcttcttgcttccaaaaggaaaggagtgcgtactctcgttgcctgtacatcgtccacagcccctgggtcgggncngcggtccctgggccgcccggggggtccacatgcagcccctgggtgg

SEQ ID NO: 7676 - DNA, 2252 bp, Homo sapiens
aattcggcttcgacgttggccctgtctgcttcctgtaaactccctccatcccaacctggctccctcccacccaaccaactttccccccaacccggaaacagacaagcaacccaaactgaacccccccaaaagccaaaaaatgggagacaatttcacatggactttggaaaatatttttttcctttgcattcatctctcaaacttagtttttatctttgaccaaccgaacatgaccaaaaaccaaaagtgcattcaaccttaccaaaaaaaaaaaaaaaaaaaaaagaataaataaataagtttttaaaaaaggaagcttggtccacttgcttgaagacccatgcgggggtaagtccctttctgcccgttgggttatgaaaccccaatgctgccctttctgctcctttctccacaccccccttggcctcccctccactccttcccaaatctgtctccccagaagacacaggaaacaatgtattgtctgcccagcaatcaaaggcaatgctcaaacacccaagtggcccccaccctcagcccgctcctgcccgcccagcacccccaggccctggggacctggggttctcagactgccaaagaagccttgccatctggcgctcccatggctcttgcaacatctccccttcgtttttgagggggtcatgccgggggagccaccagcccctcactgggttcggaggagagtcaggaagggccacgacaaagcagaaacatcggatttggggaacgcgtgtcatcccttgtgccgcaggctgggcgggagagactgttctgttctgttccttgtgtaactgtgttgctgaaagactacctcgttcttgtcttgatgtgtcaccggggcaactgcctgggggcggggatgggggcagggtggaagcggctccccatttttataccaaaggtgctacatctatgtgatgggtggggtggggagggaatcactggtgctatagaaattgagatgcccccccaggccagcaaatgttcctttttgttcaaagtctatttttattccttgatattttttctttctttttttttttttttgtggatggggacttgtgaatttttctaaaggtgctatttaacatgggaggagagcgtgtgcgctccagcccagcccgctgctcactttccaccctctctccacctgcctctggcttctcaggcctctgctctccgacctctctcctctgaaaccctcctccacagctgcagcccatcctcccggctccctcctagtctgtcctgcgtcctctgtccccgggtttcagagacaacttcccaaagcacaaagcagtttttccctaggggtgggaggaagcaaaagactctgtacctattttgtatgtgtataataatttgagatgtttttaattattttgattgctggaataaagcatgtggaaatgacccaaacataatccgcagtggcctcctaatttccttctttggagttgggggaggggtagacatggggaaggggccttggggtgatgggcttgccttccattcctgccctttccctccccactattctcttctagatccctccataaccccactcccctttctctcacccttcttataccgcaaacctttctacttcctctttcattttctattcttgcaatttccttgcaccttttccaaatcctcttctcccctgcaataccatacaggcaatccacgtgcacaacacacacacacactcttcacatctggggttgtccaaacctcatacccactccccttcaagcccatccactctccaccccctggatgccctgcacttggtggcggtgggatgctcatggatactgggagggtgaggggagtggaacccgtgaggaggacctgggggcctctccttgaactgacatgaagggtcatctggcctctgctcccttctcacccacgctgacctcctgccgaaggagcaacgcaacaggagaggggtctgctgagcctggcgagggtctgggagggaccaggaggaaggcgtgctccctgctcgctgtcctggccctgggggagtgagggagacagacacctgggagagctgtggggaaggcactcgcaccgtgctcttgggaaggaaggagacctggccctgctcaccacggactgggtgcctcgacctcctgaatccccagaacacaacccccctgggctggggtggtctggggaaccatcgtgcccccgcctcccgcctactcctttttaagctt

SEQ ID NO: 7677 - DNA, 427 bp, Homo sapiens
  misc_feature (1)..(427): n=a,t,g or c
ttttttgcggttctgcaaactttttttaattttaattttatttttttacaatgtaccatgaacatcttttccatgcacatgggtgaaaatcctctactaaaatatagagcgccgtagttgggtcaaaaggctgctggtaacgagactgacatctaaagcaaagtatcagcttaaggttaaagcattgggcctggcaaatacctaccagggaaagcagggccagcaatattctcatcagagaaatcagaatggaaggccaaaggatttaaaggtatgggatatcgtgtaagcccctctggcccctacctncacccctcactcccctgacaccccgttgtccccttggggcgaaatggatcctgtacatctctttgcatcccaatgaaaaccacccattttctgtttttttcccttaagctcctcttga

SEQ ID NO: 7678 - DNA, 612 bp, Homo sapiens
ggaggccaaggtgcaacttccttcggtcgtcccgaatccgggttcatccgacaccagccgcctccaccatgccgccgaagttcgaccccaacgagatcaaagtcgtatacctgaggtgcaccggaggtgaagtcggtgccacttctgccctggcccccaagatcggccccctgggtctgtctccaaaaaaagttggtgatgacattgccaaggcaacgggtgactggaagggcctgaggattacagtgaaactgaccattcagaacagacaggcccagattgaggtggtgccttctgcctctgccctgatcatcaaagccctcaaggaaccaccaagagacagaaagaaacagaaaaacattaaacacagtgggaatatcacttttgatgagattgtcaacattgctcgacagatgcggcaccgatccttagccagagaactctctggaaccattaaagagatcctggggactgcccagtcagtgggctgtaatgttgatggccgccatcctcatgacatcatcgatgacatcaacagtggtgctgtggaatgcccagccagttaagcacaaaggaaaacatttcaataaaggatcatttgacaactggtga

SEQ ID NO: 7679 - DNA, 311 bp, Homo sapiens
tttttttttttttggctatcaaattccaaagaagccccattttattacagagaaaatacaaagccgtttcctcacagggaaaagtacagtttcccttctccagggtgacagatgagccttttccgaagttctcagctttctcttctatcgaaacttcccatgtcggttaaagtgtttgtagagatagcggatggctttattaaggttgtgcaggtcatcagcgaacattctacttccaaccattttcctctttcggatacaacgttgcaattcattccctttccaacctcgaagccatatgggccccctga

SEQ ID NO: 7680 - DNA, 425 bp, Homo sapiens; identical to SEQ ID NO: 3473

SEQ ID NO: 7681 - DNA, 214 bp, Homo sapiens; identical to SEQ ID NO: 3784

SEQ ID NO: 7682 - DNA, 7530 bp, Homo sapiens
cacgcctgtagttcagctactcagaaggctaggcagaactacttgaacccagagtggaggttgcagtgagccaagatcgcaccattgcactccaccctgggcaacagagtgagaccctgtctcaaaaaaaaaaaaaaattaaaaataggtaaattccattttcaaagatacctgtaaagatttttaaaatcattcatgaatgcggtctgttcgttgcacagagtagatgctcaaaaatggtgaatgagaccctctattttggtctcatgctgaagaagtccataaagcccacaagtcattttcatgatggacagaaaaatgtgtgtgctttctctgtctactgcctcaactgcacagaccccgggactgtagcagaaccatcttttgagcttgacaccgggaggcccaaattctagcacgggacctagggccagttgctctctggtcctcagtctcctcacccataaaatgggaaggagagaaccctgaatcattgcttctagcttctgaactcagttgttcagaacaaggactcactgctgatttttcaacagcacagggaattgcactgttcctggaatgatggacagtaccctctgttccactgggcaagtgagatttcccaggcctctctgttcccttctccccttagagagcaacagacgtgtggccccaccacctccctcaaccctctctctcctccctcaggactgggcacctcgctgcccccgctgctgcccactctgcgactgtgcctgtacgtgccagctccccgactgccgagacctcaactgtctctgcttcgagatcaagctccataggacccaggcccctgcctctggggagcggccagcccccaggcccatgtgccctcctccctgaagagcctttccccacgccactggaaccacagatggcctgccgagcacccaggcctgggaactggaatggcagcgcagggcctggctcctgcagggcaggactcttggccggctggacggcagctcctctggagggccagaaaagagagggctagtgctcggcagtgccctgcttcccttcccctccacacgtcaacgattctatttgaagttgggcagggggtggcgctgctcaccacacacaagtgttataggaggagtctggccccgtagtaccgggtacgcaggggtgcctcaaccacactccgtccacggactctccgttattttaggaggtagatgtagtgccagtatctactctccttcttaaaaaaaaccagggctccagagaatcagaacagccaccatcaccgcagggagtcaagggaggagggagattagagaaggagccagggagggtggcagggaggccacgtgatccgagtcccctcacccctttccttcccacaggtccctggccaaagatttatttctcttgacaaccaagggcctccgtctggatttccaaggaagaatttcctctgaagcaccggtgagtgggcaggggctctttgtccccaatcaatcagggccgacccaagtcttcctcccccttccccatgccgggccccacgatagtgtgaatgtcaggggcttcaggtttccctaaatataggtccctgccagaggatccgtggcgggaaaagggcaggggtcattagagaagatcggggacacatgtggggctgggcaggagctgccttataaccacccgggaacccctagctcactcgctgctgaccaggctctgccggctccttgccctcgccgcaggtgggccccttgcaggaccggccgggtgggatgggttggaattgggccaacaggtccagatgggtccaggtaggaggggagatttggacgataggagcagggggctcagcatctgggaggcagatcagttcggggacggattttcttttggagaaggaagtcaggctcaaggaagacgtttggcaggaactgtgaccccgcatgccagaggccgagcagcggccgtgcatagccgcgcattctggttttctgtggcgcagaggactaccagcctggctgcggcggcccggcggagaccgccaccatgcgcgacccagcccgcctgccagcctggaactcggatggggaggtctgcctccgcgcgccgctagtttccgaccgccttctcgctcccctgctgtcctctcgatgccctttcctccgcctcccttgacgcctgggccagtgacaggtgtcgtccgcgccgattcagcccgcgggcgaggcagctaacgcacgactgcgcgatgtggcccctatggtgacacgctgcagccgcgaagaccggaagctggggccccgggccgcgcgcgctgggcctgggaggcgaaactcagcttccttcgtttccgacttttccatccgcgtcctccacttccccgttccgccctcccccattgccaacattctggctgagatcagcgcccagagcgcgccaggctgggggaaaggagcagaagggagggccctagcgacccgcgggatgtggtccgagtcacgtccgagggggtggggagggatcgtgttctcgcgcccgccccttcctagcgcggcctctggctcgcctctcgggggcggcccgtagcccagtccgtcgcctgccattggacgccgcccgctcctcgtaaaggaaaaagctcggcggagggcggagtggtgcctttaaaaggccggcgccgccttccgcctgcaccgcctcctgcgccgccccttccgaggctaaatcgcttcctctcggaacgcgccgcagaaggggtcctggtgacgagtcccgcgttctctccttgaatccactcgccagcccgccgccctctgccgccgcaccctgcacacccgcccctctcctgtgccaggtgagcgcccctcttgcggggacccagggaccgtggagagggtcttgggggcagtggcgggttggcgtccgcgtggaggcctcccccattcgcgcccatgccagcgtctccccactaccaggcacacacaggctccccggcccctccagcctgaggtcctctaactgcgcaatgcagctgcgcgcgctgagtcatggcggggaggaagccggacgagatgaaggaccattctcccccttttcttgcagggacccctgtggcaaaggattagggccccttaccgctggcgtggatcctaagaggcagtgaggggtgggggccggcccatgtacagccccagggttctcgcaagtgggagcttggtttctgtcctgggaaacgggcgcccttcgcgaggagggaaacccctcgcgtgcttgatgcccccttaacactttccctgtctctccttatcgggcgaccattgattctgagcccggaacagctgcagccatgcgaagcgacgggagcatttttcaggggaaggcgcttgctcctccacgttcttgccccgtaggaacagtgacgatggcaaagcttaccgctttcctgcctgggctagggctagttccgccgccctttcctgggcttctccttgctctcttatatttttcctaatgcccctttcctaccacccgccccctccttgtggggaaaagcctgaccttgggatgtccttgaagccttggagcccgggccagccctgggatcttgaggggattggaaggaacacccagtggcagtcagaagagctgggttctaacctcagatctggctccggggttgctgtgtggcttgaagcacagacctttcccatatctgggccctttcccacgagggtgttgggccctctgcttgattcacgatctttacattctaaaatactccggttcggttttgttttcaggcaaggtgaccccatggcaaggcgcaagccagaagggtccagcttcaacatgacccacctgtccatgctatggccttttcctttcccccagttgccagtgggcaactccaccctcagctgggcaacacccagcaccagacagagttaggaaaggtaccggggcaggcctagcaaagggaagttgggcgtaagagagagctggggaccagaagtgccccagggcctgctgggtgtggggcaggggaggtagggaacatttccctgacctccaggagaggggccctggtcatcgggagatgatgggaaaccctagctaactagtccttcccctctgtttcctgtatccaggaacttgctactaccagcaccatgccctaccaatatccagcactgaccccggagcagaagaaggaactgtctgacatcgctcaccgcatcgtggcacctggcaagggcatcctggctgcagatgagtccactggtcgcgggcaggagacagaatgggtggagggtgcagggttgggagtggcaggctgatcccctaattcccatgtgacactcccagggagcattgccaagcggctgcagtccattggcaccgagaacaccgaggagaaccggcgcttctaccgccagctgctgctgacagctgacgaccgcgtgaaccccggcattgggggtgtcatcctcttccatgagacactctaccagaaggcggatgatgggcgtcccttcccccaagttatcaaatccaagggcggtgttgtgggcatcaaggtaaggggagggcctccggacgtgaggtttgagtaggaagtggaggaaggaaatccaggttagtgaggcagggaatgaatgctggattggtggcctagagacttgcatggagcctgcttcaggcttagggcatttactcgacattttttatcctcacaattctgagagaacagtatcattcccactttacacatgaaaatctcagaagctcagggaagtgaagtgttttgctcagagtaagtggcagagcccagtctgacacccaattcactcaacatttctgttgtcaataacatcccagtgtatcctgtctcagaggattgttactaagtgaactaagtgaaaatattttaatttaattgtaactaagtatttgagtaactaaacattttaagtaaatttttattttttttttttttgagatggagtctcgctgtctcccaggctggagtgcagtggtgcgatctcttggctcactgcaagttccgcctcccaggttcacgccattctcctgcctcagcctcccgagtagctgggactacaggcgcccgccaccacccggctaattttttttgtatttttagtagacactgggtttcaccatgttagccaggatggtctcgatctcctgatctcgtgatctgcccacctcggcctccctaagtgctgggattacaggcgtgcagccatgcccggcttaagtaactaaatattttaattgtaactaagtgaaaatatttgccagccctgaagatgcagtttaagggattaacgtaaaatagtgggggaagactggggctaaagaagaggaaagaggggcacgccagctacctaggaggctgaggcgggaggatcacttgagtccaggaaggggaggcttcaggtgagctgagattccaccactgtactccagccgaggcgaaagtggaaagggtgctagaggtcatttcctgtgtcttaatgttgttaccctgaccccaacaggtagacaagggcgtggtccccctggcagggacaaatggcgagactaccacccaaggtgagaactgtttgattctctgccctacgaacccaaccagagcaggtttgggtgctgggaggagtggaaaccacatgcccctcccaccctgctctgaccttcctcttctcttagggttggatgggctgtctgagcgctgtgcccagtacaagaaggacggagctgacttcgccaagtggcgttgtgtgctgaagattggggaacacaccccctcagccctcgccatcatggaaaatgccaatgttctggcccgttatgccagtatctgccagcaggtggcctgcaggtcctcaataggcaacctcctacctcatttggttccagtgttgttaatttgcctattaactgccatgatgcctacctccccaaaagcaagcattagctttggcgcgtggaggcactcaagggctgttgaaggcagaggggccaaggagggatggtgggtggatctgaggcggctcttgtctcctgtaatctagggctttgaagcctgagtccctggcatcatcaagatacggtcttgaccagtggctgtggagagatgtaggtgggactctgggttaggaggcctcacagtgaccctgtccctcgccctgcagaatggcattgtgcccatcgtggagcctgagatcctccctgatggggcccatgacttgaagcgctgccagtatgtgaccgagaaggtaaatggctacctgcctgaccagtgcaaggtggctggccggggaccctggggctaacccctatcctctcctccaccccactacccaccgtgcgcctgctctgctcaggtgctggctgctgtctacaaggctctgagtgaccaccacatctacctggaaggcaccttgctgaatcccaacatggtcaccccaggccatgcttgcactcagaagttttcacatgaggagattgccatggcgaccgtcacagcgctgcgccgcacagtgccccccgctgtcactggtgaggcccactcatcttgatctctatgcagtagataagctccacccacaaccctatgcccatttggacggatttcccatggcaacttccaccagctcctgccagcttcctgggtctctgacacagccccctctgctaccccctgcactacagggatcaccttcctgtctggaggccagagtgaggaggagtcgtccatcaacctcaatgccattaacaagtgccccctgctgaagccctgggccctgaccttctcctacggccgagccctgcaggcctctgccctgaaggcctggggcgggaagaaggagaacctgaaggctgcgcaggaggagtatgtcaagcgagccctggtaaggataggcaggaggtgggcagggtgcctgggtggatgggactcggggaagagcccttctcactccacccctctccctgcttaggccaacagccttgcctgtcaaggaaagtacactccgagcggtcaggctggggctgctgccagcgagtccctcttcgtctctaaccacgcctattaagcggaggtgttcccaggctgcccccaacactccaggccctgccccctcccactcttgaagaggaggccgcctcctggggctccaggctggcttgccgcgctctttcttccctcgtgacagtgttgtgtggtgtcgtctgtgaatgctaagtccatcaccctttccgggacactgccaaataaacagctatttaagggggagtcggccgtccgtgtcttgtggtgtctaatgcaggggagggcctggggaggtagcagagcccagaagaagaaagagcccctgttctctgttttttctgggcagaaaaggagtgaaaggtggaaggaccttcctgctctgttttatacttggccagggcttcaagaaaggctgagagctgtgacattttcttcactgcagg

SEQ ID NO: 7683 - DNA, 411 bp, Homo sapiens; identical to SEQ ID NO: 7089

SEQ ID NO: 7684 - DNA, 1116 bp, Homo sapiens
ctgcaggtccagcacgccagcaagcagatcgccgccgacaagcagtacaagggcatcgtggactgcattgtccgcatccccaaggagcagggcgtgctgtccttctggaggggcaaccttgccaacgtcattcgctacttccccactcaagccctcaacttcgccttcaaggataagtacaagcagatcttcctggggggcgtggacagacacgcgttctggaggtactttgcgggcaacctggcctccggcggtgcggccggcgcgacctccctctgcttcgtgtacccgctggattttgccagaacccgcctggcagcggacgtgggaaagtcaggcacagagcgcgagttccgaggcctgggagactgcctggtgaagatcaccaagtccgacggcatccggggcctgtaccagggcttcagtgtctccgtgcagggcatcatcatctaccgggcggcctacttcggcgtgtacgatacggccaagggcatgctccccgaccccaagaacacgcacatcgtggtgagctggatgatcgcgcagaccgtgacggccgtggccggcgtggtgtcctaccccttcgacacggtgcggcggcgcatgatgatgcagtccgggcgcaaaggagctgacatcatgtacacgggcaccgtcgactgttggaggaagatcttcagagatgaggggggcaaggccttcttcaagggtgcgtggtccaacgtcctgcggggcatggggggcgccttcgtgctggtcctgtacgacgagctcaagaaggtgatctaagggccgcggcctcctccacacacacacacacaccaggggaaccaagagaaccacgtagaatcctcaaccgtgcggaccatcaaccttcgagaaattccagttgtctttttcccagccgcatcctgcctgtagatggccggggaaggctctagaaaaggggcgcattgcgatccaaccatcggcagccgattccgtgtcttgatcacggggtgggagggaaccgtggcgtccctgcgtggggcccatgggtgagacactccagtactgagacctagagtccagatgcttgtaggagccaagtcgtgttctaagtatttatttaaaaca

SEQ ID NO: 7685 - DNA, 1093 bp, Homo sapiens
ctgcaaggcggcggcaggagaggttgtggtgctagtttctctaagccatccagtgccatcctcgtcgctgcagcgacaccgctctcgccgccgccatgactgagcagatgacccttcgtggcaccctcaagggccacaacggctgggtaacccagatcgctactaccccgcagttcccggacatgatcctctccgcctctcgagataagaccatcatcatgtggaaactgaccagggatgagaccaactatggaattccacagcgtgctctgcggggtcactcccactttgttagtgatgtggttatctcctcagatggccagtttgccctctcaggctcctgggatggaaccctgcgcctctgggatctcacaacgggcaccaccacgaggcgatttgtgggccataccaaggatgtgctgagtgtggccttctcctctgacaaccggcagattgtctctggatctcgagataaaaccatcaagctatggaataccctgggtgtgtgcaaatacactgtccaggatgagagccactcagagtgggtgtcttgtgtccgcttctcgcccaacagcagcaaccctatcatcgtctcctgtggctgggacaagctggtcaaggtatggaacctggctaactgcaagctgaagaccaaccacattggccacacaggctatctgaacacggtgactgtctctccagatggatccctctgtgcttctggaggcaaggatggccaggccatgttatgggatctcaacgaaggcaaacacctttacacgctagatggtggggacatcatcaacgccctgtgcttcagccctaaccgctactggctgtgtgctgccacaggccccagcatcaagatctgggatttagagggaaagatcattgtagatgaactgaagcaagaagttatcagtaccagcagcaaggcagaaccaccccagtgcacttccctggcctggtctgctgatggccagactctgtttgctggctacacggacaacctggtgcgagtgtggcaggtgaccattggcacacgctagaagtttatggcagagctttacaaataaaaaaaaaatggcttttc

SEQ ID NO: 7686 - DNA, 278 bp, Homo sapiens
gtggtctaaaataaacttttaattgcacatttgtgtcttgggttatctgtggggtgagaaacctcctcacttccaatcccagctatctgggtacaatctggtgttgtggtctggctgtcggcgaggggtagaggtgggtgcaggactggcccccgagtctgcaccgacctcttcagggcagggagctcagaccatggtagtacttgcactgcttcagggcctcgctgaagccctcacacagggacaggtcactctgagtggtggaacagtccaggaac

SEQ ID NO: 7687 - DNA, 297 bp, Homo sapiens; identical to SEQ ID NO: 968
  misc_feature (1)..(297): n=a,t,g or c

SEQ ID NO: 7688 - DNA, 298 bp, Homo sapiens
  misc_feature (1)..(298): n=a,t,g or c
aaaatgacaaattctttatttaaatcaacaaactcatcttcctcaagccccagaccatggtaggcagccctccctctccatnnactcaccncaccccttagccacagtgaagggaatggaaaatgagaagccacgagggcccctgccaggaaaggctgccccagatgtgtggtgagcacagtcagtgcagcngtggctggggcagcagntgccacaggctcctccctataaattaagttcctgcagccanagctgtgggagaagcatacttgtngnagaaagggcagtccngcntcag

SEQ ID NO: 7689 - DNA, 423 bp, Homo sapiens
catctttaatgaaatgactgtggaaataacatatatttccatgacaccagtactacagtcttcggagtcacagcaagatacacagaattacatccgtaattactatgaatgccaacatttcaggcagtaatttctgttacatggcaaacaagatcaagaacgcaaccatcaaacaaaagagacccatagcttcagacaaggcaaatcccaggatagcatatgagaacagctgctgattacactggtctgaaactcccttcggatcagctgacacacaccattctgggccccattaaaaactgtagagccctctccagtcctagtctctggcgagataacactgatgcagaaattggtctatatgcaactctggatccagctcggatcagagcgggggtgcgggcgagcttggcgcaggcgaaa

SEQ ID NO: 7690 - DNA, 319 bp, Homo sapiens
ggagaatacctccctaagcccttaatgcggtcgagcttgctttgtgatgttggcatgggaggggagacctgggtggtgactgagttccctttatcaaacccttcaatgggcacaaaattgagtgcttgattttaggttttatttttttatgaatgtccaaatctgtgtttccccctgccctcccagactgtgtggccagttgaaagtgtctggtttgtgttcatctctccctcatttctggagcagggccatgagaccctcgcacatctcctatgctctgcatccacgcctcttttggacattaaaggttgattgatgc

SEQ ID NO: 7691 - DNA, 265 bp, Homo sapiens; identical to SEQ ID NO: 834

SEQ ID NO: 7692 - DNA, 428 bp, Homo sapiens
  misc_feature (1)..(428): n=a,t,g or c
gtgggagcacacagaccaggtcccaatcctggttctgcccctgactggctggtgactctgagcaagttgcttgacctctccaagcctccgtttcctcatgtgcaaagtgtggacaaaacagtaccttcctcataaggaacgtgcgacgcgcctcagaagtacgtgttcataaatggtagccattgttgttaccttcccgtctgtgaacatggatcacatcatctctgtgggtaacccagtcctcgttgtatgacttgtcaaaatgcagttccacttgtattaatattgaccctgttcatcgtcaccanggactgcatcttgcaccactgtgccgtcttctaggcacacacgaccccgttatctcccttggaaaaattcctctcactggaaatgtacaattaaaggatgattgaaatgtttaaaaaaaa

SEQ ID NO: 7693 - DNA, 145 bp, Homo sapiens
ttgataatagttcattttattaaataatttataaagtcagaccagtgcattgggcttgttatgggaaaccattccttcctactgtcacatatcctttcatattatatcaggtgccaaaacattcccttttattcaatttattaat

SEQ ID NO: 7694 - DNA, 446 bp, Homo sapiens
tttttttttaaactcagaaatggcaaatagatttaatgcagagtgtcaacttcaattgattgatagtggctgcctagagtgctgtgttgagtaggtttctgaggatgcaccctggcttgaagagaaagactggcaggattaacaatatctaaaatctcacttgtaggagaaaccacaggcaccagagctgccactggtgctggcaccagctccaccaaggccagcgaagagcccaaatgtgagagtggcggtcaggctggcaccagcactgaagccaccactggtgctggcactggcactggcactgttattggtactggtactggcaccagtgctggcactgccactctcttgggctttggctttagcttctgctcccgcctggatccgggctttggccagggtccgatatcagcttcgtcccagttgcagggcccggcagcatt

SEQ ID NO: 7695 - DNA, 342 bp, Homo sapiens
ttgtggctgccgtgcgtgtctatttattgttgctgccaccctggaggagccccagtttcttctgtagctttcttttctgggggatcttcctggctctgcccctccattcccagcctctcactccccatcttgcacttttgctagggttggaggcgctttcctggtagcccctcagagactcagtcagcgggaataagtcctaggggtggggggtgtggcaagccggcctggatcctgtcctgggtcctccttcctccgcagtcccgtctctattgctgggtgtagtgtccatggtctggcctcatctccagctctgtctcagcgccgtgcccctcgcttctt

SEQ ID NO: 7696 - DNA, 1746 bp, Homo sapiens
gagcctgacttcagcgctcccactctcggccgacacccctcatggccaaccgttacaccatggatctgactgccatctacgagagcctcctgtcgctgagccctgacgtgcccgtgccatccgaccatggagggactgagtccagcccaggctggggctcctcgggaccctggagcctgagcccctccgactccagcccgtctggggtcacctcccgcctgcctggccgctccaccagcctagtggagggccgcagctgtggctgggtgcccccaccccctggcttcgcaccgctggctccccgcctgggccctgagctgtcaccctcacccacttcgcccactgcaacctccaccaccccctcgcgctacaagactgagctatgtcggaccttctcagagagtgggcgctgccgctacggggccaagtgccagtttgcccatggcctgggcgagctgcgccaggccaatcgccaccccaaatacaagacggaactctgtcacaagttctacctccagggccgctgcccctacggctctcgctgccacttcatccacaaccctagcgaagacctggcggccccgggccaccctcctgtgcttcgccagagcatcagcttctccggcctgccctctggccgccggacctcaccaccaccaccaggcctggccggcccttccctgtcctccagctccttctcgccctccagctccccaccaccacctggggaccttccactgtcaccctctgccttctctgctgcccctggcacccccctggctcgaagagaccccaccccagtctgttgcccctcctgccgaagggccactcctatcagcgtctgggggcccttgggtggcctggttcggaccccctctgtacagtccctgggatccgaccctgatgaatatgccagcagcggcagcagcctggggggctctgactctcccgtcttcgaggcgggagtttttgcaccaccccagcccgtggcagccccccggcgactccccatcttcaatcgcatctctgtttctgagtgacaaagtgactgcccggtcagatcagctggatctcagcggggagccacgtctcttgcactgtggtctctgcatggaccccagggctgtggggacttgggggacagtaatcaagtaatccccttttccagaatgcattaacccactcccctgacctcacgctggggcaggtccccaagtgtgcaagctcagtattcatgatggtgggggatggagtgtcttccgaggttcttgggggaaaaaaaattgtagcatatttaagggaggcaatgaaccctctcccccacctcttccctgcccaaatctgtctcctagaatcttatgtgctgtgaataataggccttcactgcccctccagtttttatagacctgaggttccagtgtctcctggtaactggaacctctcctgagggggaatcctggtgctcaaattaccctccaaaagcaagtagccaaagccgttgccaaaccccacccataaatcaatgggccctttatttatgacgactttatttattctaatatgattttatagtatttatatatattgggtcgtctgcttcccttgtatttttcttcctttttttgtaatattgaaaacgacgatataattattataagtagactataatatatttagtaatatatattattaccttaaaagtctatttttgtgttttgggcatttttaaataaacaatctgagtgt

SEQ ID NO: 7697 - DNA, 209 bp, Homo sapiens
  misc_feature (1)..(209): n=a,t,g or c
ttttttttttttttccccaaaggaatgctttattgacaaattacccattattataataactttaaggaaaagatacatcggtcaacacccgcacaacctgccttctcaccacaccccacaggccgnttttaaccctggncgaagggcaccgagcgntgggnttccctggcccctgcatntntgtcgtgtgtggagtgccatccccaagg

SEQ ID NO: 7698 - DNA, 287 bp, Homo sapiens
  misc_feature (1)..(287): n=a,t,g or c
ggaagccagtattttatttctcttggctgcagagggccgctcttgcctaggcgtccacaggcgcgacgatggggctcgcggaggagtccgcagcagggcaccccacanccgggggaccggcctcggcgagaagggcacanagtggaagaccccaccaagcccggcgccacccagcagcgtggggactgcctgtccgccgtccatcccaccctccccgtcccacgacctcctcctggggctaatggnagnaacaggnagnaccccgccgaattgtccgtgcaattacc

SEQ ID NO: 7699 - DNA, 891 bp, Homo sapiens
tttttttttctctctcctcccgccgcccaagatgccgaaaggaaagaaggccaagggaaagaaggtggctccggccccagctgtcgtgaagaagcaggaggctaagaaagtggtgaatcccctgtttgagaaaaggcctaagaattttggcattggacaggacatccagcccaaaagagacctcacccgctttgtgaaatggccccgctatatcaggttgcagcggcagagagccatcctctataagcggctgaaagtgcctcctgcgattaaccagttcacccaggccctggaccgccaaacagctactcagctgcttaagctggcccacaagtacagaccagagacaaagcaagagaagaagcagagactgttggcccgggccgagaagaaggctgctggcaaaggggacgtcccaacgaagagaccacctgtccttcgagcaggagttaacaccgtcaccaccttggtggagaacaagaaagctcagctggtggtgattgcacacgacgtggatcccatcgagctggttgtcttcttgcctgccctgtgtcgtaaaatgggggtcccttactgcattatcaagggaaaggcaagactgggacgtctagtccacaggaagacctgcaccactgtcgccttcacacaggtgaactcggaagacaaaggcgctttggctaagctggtggaagctatcaggaccaattacaatgacagatacgatgagatccgccgtcactggggtggcaatgtcctgggtcctaagtctgtggctcgtatcgccaagctcgaaaaggcaaaggctaaagaacttgccactaaactgggttaaatgtacactgttgagttttctgtacataaaaataattgaaataatacaaattttccttc

SEQ ID NO: 7700 - DNA, 148 bp, Homo sapiens
tttttttttcttagatggggtcttgctgtgttgcccaggctacgctcaaattcttgggtttaagcaatcctccggcctcagcctctcaagtagctgggattgcaggctgcatccgcacccagctcctaacaattttttttccccctct

SEQ ID NO: 7701 - DNA, 293 bp, Homo sapiens
tttttttttgcaggtgcatttgtttctttatttaaaaaaatcatctgggggcatggtctgaggaggagaccctcccatggctttggggaggacgcaggttccaggagtcacagggcagaaacacgcggggtgggtgggggcgtggcggagtggggaggggctgtgcacagcacctgggggtggctcccacggcaccaggtgggctagggcaacagtatgtacaggcgagcagtgctcctggacccggtcggggccggctggggcccaattctgcggcaggggagctctggggc

SEQ ID NO: 7702 - DNA, 355 bp, Homo sapiens
atttttatattatttatttattcttccttagtttcttgagattatcatccgctgagggtggaaggggagtgagcagacacactcgggaggtgtcttgagattatcatccactgagggtggagctgagggtggaaggggagtgagcagacactcgggaggtgtcttgagattatcatccgctgagggtggaaggggatagagcagacactccgcaggtgtcttgagattatcatccgctgagggtagagctgagggtggaaggggagtgagcagacactcggaaggtgtcttgaggctcagggagttatcaattatagaatgttgttgagttggaggaggtggctggtggcccatc

SEQ ID NO: 7703 - DNA, 438 bp, Homo sapiens
gctctccggtccgtgcctccaagatgacaaagaaaagaaggaacaatggtcgtgccaaaaagggccgcggccacgtgcagcctattcgctgcactaactgtgcccgatgcgtgcccaaggacaaggccattaagaaattcgtcattcgaaacatagtggaggccgcagcagtcagggacatttctgaagcgagcgtcttcgatgcctatgtgcttcccaagctgtatgtgaagctacattactgtgtgagttgtgcaattcacagcaaagtagtcaggaatcgatctcgtgaagcccgcaaggaccgaacacccccaccccgatttagacctgcgggtgctgccccagctcccccaccaaagcccatgtaaggagctgagttcttaaagactgaagacaggctattctctggagaaaaataaaatggaaattgtactt

SEQ ID NO: 7704 - DNA, 603 bp, Homo sapiens; identical to SEQ ID NO: 814

SEQ ID NO: 7705 - DNA, 325 bp, Homo sapiens
  misc_feature (1)..(325): n=a,t,g or c
ttttttttttgggtgtgaacacgcatttatttacacattgtcatcggtaggcacatacccagcccagcccgttgaagggacagatctcaggctgtcacccatggaacctgcagacccttccctcctccagaacccttgaaggcgaanctgaggagaaccaggnnttttaggcttctgttcaagagctaagaactaaattttatgccttcatctgatttctttccaaaaagtccatttcattaagtattcagacttcttagctccatcccattcatacttttngctctcctactacccacccaagattgttaataataacaataat

SEQ ID NO: 7706 - DNA, 1271 bp, Homo sapiens
atgcgggtcatggcgccccgaaccgtcctcctgctgctctcgggagccctggccctgaccgagacctgggccggctcccactccatgaggtatttctacaccgccatgtcccggcccggccgcggggagccccgcttcatcgcagtgggctacgtggacgacacccagttcgtgaggttcgacagcgacgccgcgagtccgaggatggcgccccgggcgccatggatagagcaggaggggccggagtattgggaccgggagacacagatctccaagaccaacacacagacttaccgagagagcctgcggaacctgcgcggctactacaaccagagcgaggccgggtctcacaccctccagaggatgtaaggctgcgacgtggggccggacgggcgcctcctccgcgggcatgaccagtccgcctacgacggcaaggattacatcgccctgaacgaggacctgagctcctggaccgcggcggacacggcggctcagatcacccagcgcaagtgggaggcggcccgtgaggcggagcagtggagagcctacctggagggcctgtgcgtggagtggctccgcagatacctggagaacgggaaggagacgctgcagcgcgcggaccccccaaagacacatgtgacccaccaccccatctctgaccatgaggccaccctgaggtgctgggccctgggcttctaccctgcggagatcacactgacctggcagcgggatggcgaggaccaaactcaggacaccgagcttgtggagaccagaccagcaggagatagaaccttccagaagtgggcagctgtggtggtgccttctggagaagagcagagatacacatgccatgtacagcatgaggggctgccgaagcccctcaccctgagatgggagccatcttcccagtccaccatccccatcgtgggcattgttgctggcctggctgtcctagcagttgtggtcatcggagctgtggtcgctactgtgatgtgtaggaggaagagctcaggtggaaaaggagggagctactctcaggctgcgtccagcgacagtgcccagggctctgatgtgtctctcacagcttgaaaagcctgagacagctcggccgctgagggcccgagatgcaggatctcctcacccctcccctttgtgacttcaagaccctctggcatctctttctccaaaggcacctgaatgtgtctgcgcccctgttagcataatgtgaggaggtggagagacagcccacccttgtgtccactgtgacccct

SEQ ID NO: 7707 - DNA, 448 bp, Homo sapiens
  misc_feature (1)..(448): n=a,t,g or c
actcagcatncnttttattttnctatctgacatttctaacaaaacgccagggagacggagttaaaaagaatccaccccacgaaaggtaaacaaaggagaccctcagaaactccctggcaaggatgttcccctccccagattgggcccagtttcaccagcaactgggtctcagactcagccttatgcctttccactgacaccccccacccctccacantctcgtgattcagaccagggaacttctcgggctgattgtgtccgtgtgtctgagggaggggcacgctggaacctgggaacctactgggcacctctaatgcagatgagaaaaacttgagaatgtgaaaggagatcagtccccgntcccacccgaaggtgcagagacgcgggacattaaccagcagnacgcgggggtgaaggaactcagggcaatttctcccantgccagggg

SEQ ID NO: 7708 - DNA, 451 bp, Homo sapiens
  misc_feature (1)..(451): n=a,t,g or c
agaagtacaactcatgtcgagacatgtatttattattatgctttgatatgcaatcccaggnattctgatctggagtaaaaagcaaactaaatgaagacaacttttagaaactgatgtttattttccatcaaccattttnccatgctgcttaagagcctatgcaagancagcttaagaccagtcagtggttgctcctacccattcagtgggcctgagcagtgggagctgcaggaccagtcttccgtgggcagggctgagcgctccaggtcttcagtaggggaattgctgaatagggcacagagggcacctgttacaccttcaggaccagtctggcaacctcagggctgaggtaggcagtggaacttcagggagcggggacangttccatttcaccctggaaattcctccttgggtcactggcnttttnaggcaggaagcctgttnttatttt

SEQ ID NO: 7709 - DNA, 457 bp, Homo sapiens
  misc_feature (1)..(457): n=a,t,g or c
tttttttttattaaaaaactttttaattggtttacaaaggaggctacagactacattgaaactaatctttgtacaaaaggccaaaaaaaaaaaaaaagtcccaaaacaccaagagacaaaaggtaggaggaaagacaagaaaggaagatacaaaaggagcaggaagaaacttacttagggacaagattagcatcatacatacctaagagtggggggtgagggggaagaacaagatgagagagcatttaaaagcatttacccacacagccctggtgataattggattggaatcaaaacaaacacagcatgagattttaagaggttttaaaaggcaccagtggtgtggctggttattgccagtgttaagagagaataacttgggttttagcaccagagattggagcaccacccatccctccagaggtgccagctttggaangggaacagncctggggag

SEQ ID NO: 7710 - DNA, 2171 bp, Homo sapiens
gcacgagccatggcggacaacgagaaactggacaaccaacggctcaagaatttcaagaacaaaggccgcgacttggagactatgagaagacaacgaaatgaagttgtagttgaattaaggaagaataaaagagatgaacatctcttaaagagaaggaatgtaccacatgaagatatctgtgaagactctgatatagatggtgattatagagtgcaaaatacctctctagaagctattgttcaaaatgcttcaagtgataaccaaggaattcaattaagtgcagttcaagctgctaggaagcttttgtccagtgatcgaaatccaccaattgatgacttaataaaatctggaatattgcccattttagtccattgtcttgaaagagatgacaatccttctttacagtttgaagctgcatgggctttgacaaacattgcatctggaacttctgaacaaactcaagcagtagttcagtccaatgctgtgccacttttcctgaggcttctccattcaccccatcagaatgtctgtgagcaagcagtgtgggcattgggaaatatcataggtgatgggccccagtgtagagattatgtcataagtcttggagttgtgaaacctttactttccttcataagtccatctattcctataacattcttaagaaatgttacttgggttatggtcaacttatgtcgccacaaagacccaccaccaccaatggaaaccattcaggagattcttccagccctttgtgttttaattcatcacacagatgtaaatatactggtagacacagtctgggccctctcttaccttactgatgctggcaatgaacaaatacagatggtaatagactctggaatagttcctcatttggttcctctgctcagccaccaggaagttaaagttcagactgctgcacttagagctgtgggcaacattgttactggaactgatgagcaaacacaagtagttttgaactgtgatgctctttcacacttcccagcactcctgacacatcccaaagagaaaattaataaagaagcagtgtggttcctctccaacatcactgcaggaaatcagcagcaggtacaggcagtaattgatgccaatcttgtaccaatgataatacaccttttggataagggggattttggcactcaaaaagaagctgcttgggccataagtaacttaacaattagtggaaggaaagatcaagtggcttaccttatccaacaaaatgttatcccacctttttgcaacttgctgactgtaaaagatgcacaagttgtgcaagtagtactcgatggactaagtaatatattaaaaatggctgaagatgaggcagaaaccataggcaatcttatagaagaatgtggagggctggagaaaattgaacaacttcaaaatcatgaaaatgaagacatctacaaattggcctatgagatcattgatcagttcttctcttcagatgatattgatgaagaccctagccttgttccagaggcaattcaaggcggaacatttggtttcaattcatctgccaatgtaccaacagaagggttccagttttagaaagatgttgtggaagttaggtacaatgcagcactgagatatatatatatatatgtgtgtgtgtatatatatatatatatacatatatataaaaaggtttgatccatcaaaaaaaaaaaaaaaaaaaaaaaaaaaaaaaaaactcgtgccgaattcggcacgagcacgcgtgagacttctccgccgcctccgccgcagacgccgccgcgatgcgctacgtcgcctcctacctgctggctgccctagggggcaactcctcccccagcgccaaggacatcaagaagatcttggacagcgtgggtatcgaggcggacgacgaccggctcaacaaggttatcagtgagctgaatggaaaaaacattgaagacgtcattgcccagggtattggcaagcttgccagtgtacctgctggtggggctgtagccgtctctgctgccccaggctctgcagcccctgctgctggttctgcccctgctgcagcagaggagaagaaagatgagaagaaggaggagtctgaagagtcagatgatgacatgggatttggcctttttgattaaattcctgctcccctgcaaataaagcctttttacacatct

SEQ ID NO: 7711 - DNA, 466 bp, Homo sapiens
taactcatacaaatttattttaaataagccttaaaatcagaattaaattgataaatgaagtaatctattgaaaaatgttattttacatccattctgggtattaccacaaattttaaaagtagaagcatagcatttgccagttattttaaaaaaccgagtcaatacaaattagtctcaaagttcttgaaaattaataagtgatttttctcactacttaaccatacctggaataacctttgaagaaacacctactagcaaactttagacaacaattataaaaccagattgttggcagaggacacaacaaaatgtaagttagaaaattcataaacatacatttattcaggaaatacaattactagaatccttgatatttcaatgatcattccacattataaaatattcacaaacatggtagtttttttaagtctacacccaggtcatgctgacattcctttttgggata

SEQ ID NO: 7712 - DNA, 477 bp, Homo sapiens
ttcactttgcaatttcaatgtttatttctgataccaaaacttgacagcacacaaggggaaaaaaagcagtagacaaggaacagcaaataaatttatcttgcatgccactttcagtcaacaggatgtggctctctagatagctgtgtttagaaggaatctgaggcttcagctcacgacaggggaaagactactgcgattgatagcaatatccaacatctcactcaacccagaagaaaccaatggcaccaaagttggcagcgaagttggcactggctgtaccaccaggaccaataatgggaccggcaaaggtctgagggaatctggagcgggcattctggtggtatctggcccagaaggtaaatggaattctggaccagggatctccaaaatctccttcctcatcccaggtcagcagctcaaactcaatgtcatcccagctccagggcccagacacagcctcatctccaattcccatgc

SEQ ID NO: 7713 - DNA, 1059 bp, Homo sapiens
gctctcgtcttctgcggctctcggtgccctctccttttcgtttccggaaacatggcctccggtgtggctgtctctgatggtgtcatcaaggtgttcaacgacatgaaggtgcgtaagtcttcaacgccagaggaggtgaagaagcgcaagaaggcggtgctcttctgcctgagtgaggacaagaagaacatcatcctggaggagggcaaggagatcctggtgggcgatgtgggccagactgtcgacgatccctacgccacctttgtcaagatgctgccagataaggactgccgctatgccctctatgatgcaacctatgagaccaaggagagcaagaaggaggatctggtgtttatcttctgggcccccgagtctgcgccccttaagagcaaaatgatttatgccagctccaaggacgccatcaagaagaagctgacagggatcaagcatgaattgcaagcaaactgctacgaggaggtcaaggaccgctgcaccctggcagagaagctggggggcagtgcggtcatctccctggagggcaagcctttgtgagccccttctggccccctgcctggagcatctggcagccccacacctgcccttgggggttgcaggctgcccccttcctgccagaccggaggggctggggggatcccagcagggggaggcaatcccttcaccccagttgccaaacagaccccccaccccctggattttccttctccctccatcccttgacggttctggccttcccaaactgcttttgatcttttgattcctcttgggctgaagcagaccaagttccccccaggcaccccagttgtgggggagcctgtattttttttaacaacatccccattccccacctggtcctcccccttcccatgctgccaacttctaaccgcaatagtgactctgtgcttgtctgtttagttctgtgtataaatggaatgttgtggagatgacccctccctgtgccggctggttcctctcccttttcccctggtcacggctactcatggaagcaggaccagtaagggaccttcgattaaaaaaaaa

SEQ ID NO: 7714 - DNA, 2309 bp, Homo sapiens
ggagttggcgagtgtgttttgtgagtttttaggcaccttttgaaatgtaatcatttgggtcaatatgtaattttcagtgttagactagtaaattgtccgctaaattctggccgtttttggcttttttgttagacaatgcagatcttcgtgaagactctgactggtaagaccatcaccctcgaggtggagcccagtgacaccatcgagaatgtcaaggcaaagatccaagataaggaaggcattcctcctgatcagcagaggttgatctttgccggaaaacagctggaagatggtcgtaccctgtctgactacaacatccagaaagagtccaccttgcacctggtactccgtctcagaggtgggatgcaaatcttcgtgaagacactcactggcaagaccatcacccttgaggtcgagcccagtgacacaatcgagaacgtcaaggcaaagatccaagacaaggaaggcattcctcctgaccagcagaggttgatctttgccggaaagcagctggaagatgggcgcaccctgtctgactacaacatccagaaagagtctaccctgcacctggtgctccgtctcagaggtgggatgcagatcttcgtgaagaccctgactggtaagaccatcaccctcgaagtggagccgagtgacaccattgagaatgtcaaggcaaagatccaagacaaggaaggcatccctcctgaccagcagaggttgatctttgccggaaaacagctggaagatggtcgtaccctgtctgactacaacatccagaaagagtccaccttgcacctggtgctccgtctcagaggtgggatgcagatcttcgtgaagaccctgactggtaagaccatcactctcgaggtggagccgagtgacaccattgagaatgtcaaggcaaagatccaagacaaggaaggcatccctcctgatcagcagaggttgatctttgctgggaaacagctggaagatggacgcaccctgtctgactacaacatccagaaagagtccaccctgcacctggtgctccgtcttagaggtgggatgcagatcttcgtgaagaccctgactggtaagaccatcactctcgaagtggagccgagtgacaccattgagaatgtcaaggcaaagatccaagacaaggaaggcatccctcctgaccagcagaggttgatctttgctgggaaacagctggaagatggacgcaccctgtctgactacaacatccagaaagagtccaccctgcacctggttctccgtcttagaggtgggatgcagatcttcgtgaagaccctgactggtaagaccatcactctcgaagtggagccgagtgacaccattgagaatgtcaaggcaaagatccaagacaaggaaggcatccctcctgaccagcagaggttgatctttgctgggaaacagctggaagatggacgcaccctgtctgactacaacatccagaaagagtccaccctgcacctggtgctccgtctcagaggtgggatgcagatcttcgtgaagaccctgactggtaagaccatcaccctcgaggttgagcccagtgacaccatcgagaatgtcaaggcaaagatccaagataaggaaggcatccctcctgatcagcagaggttgatctttgctggaaaacagctggaagatgggcgcaccctgtctgactacaacattcagaaagagtccaccctgcacctggtgctccgtctcagaggtgggatgcaaatcttcgtgaagacactcactggcaagaccatcacccttgaggtggagcccagtgacaccatcgagaacgtcaaggcaaagatccaggacaaggaaggcattcctcctgaccagcagaggttgatctttgccggaaagcagctggaagatgggcggaccctgtctgactacaacatccagaaagagtctaccctgcacctggtgctccgtctcagaggtgggatgcagatcttcgtgaagaccctgactggtaagaccattaccctcgaggtggagcccagtgacaccatcgagaatgtcaaggcaaagatccaagataaggaaggcatccctcctgatcagcagaggttgatctttgctgggaaacagctggaagatggacgcaccctgtctgactacaacatccagaaagagtccactctgcacttggtcctgcgcttgagggggggtgtctaagtttccccttttaaggtttcaacaaatttcattgcactttcctttcaataaagttgttgcattcccaattggtgttttttttttttttttttttttttttaagtttattttgcatt

SEQ ID NO: 7715 - DNA, 329 bp, Homo sapiens
  misc_feature (1)..(329): n=a,t,g or c
cattttttaaaattttattactgtttaccaatggggagatgcagttwatttacaccagcagccataggggaaaggggaatacagtwaatcagctatctgtataggawggactacttatrcaaaaataaaaatmtccaaaacaaaggacagtrgtgagcttcactaccctcccccgatgancccagcatgcrataatrrccaggcagtggtccctsggcatgcratggtgggaactaatagatatgagaagaaaaaagccacaaaccacagaaawttttaaagaaccccccccttcccccataacacacacatacacacacacacacact

SEQ ID NO: 7716 - DNA, 138 bp, Homo sapiens
gaagttaaaattttatttatggctggagtggcataaaagatttgttttccatgcttcaaaaagaaaaaaaaagttttcagggcttctctccctccctatgcatcctacccttctgtttcctgttcttaactttatctg

SEQ ID NO: 7717 - DNA, 355 bp, Homo sapiens
tgaacatttcatcttttactttttagcaccaacagacttgataacagcctgatgctgatctgacaatgggttgatagccttcccccactgacccttaaatctgcttagtaacaagtcctttgcttctgtcattctcctgggggatggcctactcgccctcctttctgtacaatctgggcaaaccgactggtgatggcaagagtggtgtcaatgaagcggtctacacagctggagagacaattttcagtgcgagagtctaggcgattccctggcttctccacacatttatcccaacataactccatgaagtgatgcacctgtgcagtaaactgcgccttctgctgctcggcggcca

SEQ ID NO: 7718 - DNA, 431 bp, Homo sapiens
ttttgtaagcagtctggattcgtgtttattgaagccagtaattagagacatctttttttcccaggactagaaagcaaggttccacatgactgcatactgcacccggacagagccacacccctggactaaggctggtgggggataatctgcagtcttacttttaagttagaaacaccaataaatttagtatacagacgacagtgaactttcacttacagcattaacattgttaaggtcatgatgtacagagcagtcactttcaactttgttaaattaataaaacatgacaatgtcttcagtttaaataccgattttaaaatgccaatcaaaaaaaagtgcaaacaaaataacaatctagcagcattatctgttgcatttttaggaaagaccaattcttggctgttatcttcagccacgtattcaaaggtggg

SEQ ID NO: 7719 - DNA, 321 bp, Homo sapiens
tttttttttcggtcataagtttaatgaagtctgaaaggtaagcgccatcgtggtcagagatacggaggcccggtcagactctccctctgcacctcaatggaaacgatgtggtgtccgggtaccatggccaggcccagcacacggggctccccggcagagaaggaatccgacggcttgaggaactcctgcgccgagcccaggatgacattgcagtcacggtcagtgcagaggaagcagccgaccagtgtccgtccatctgtcatgcgaatggcatagtcttgttgagcagcgcctctagctgctgtcgggcgcgctcagccg

SEQ ID NO: 7720 - DNA, 193 bp, Homo sapiens
acaaaagggtctttatttgtaaaaagccaaaggggcccctggcggacaggaacaggcaggcggcattctcaggggtcaggggcatttgggcagatgcgcttgagtgggggggcactcccgaagtcctctgtgtcaccctgggctgcctcagggacaggtggcactggctcaaagacagggctaagcttcgggg

SEQ ID NO: 7721 - DNA, 319 bp, Homo sapiens
  misc_feature (1)..(319): n=a,t,g or c
atggtttatccctttattgtttctcctttgatcaaaacgtgtcacagctgggaaccaagaggaagtaaaaaaaatacccacaaatatnccccgannccccattagtccnnncccannnccccacccagggcttccagccaaccccgagcacacatgatcatctccccccaccctcaggcttctcctagcaataaatacaggtgaccatgattcactgaaaccacaactgatttctccatcttaagtgcccctcaaaggggacaagaaagggggcaaaagaagtttaatgcgnatcccctaagaggtgtggaaacgtctt

SEQ ID NO: 7722 - DNA, 223 bp, Homo sapiens
  misc_feature (1)..(223): n=a,t,g or c
ccaaggccccaggggggttttatttttcctttnnaacaacccgtncggggggttcccggggtcttttggcccgaatgccgaagagccgggggtgggaacgggccaaacggagactagcgaaggttttgaaattgttctcttccccagggatgactcgagctttctccccctnaaagacgttccggacgggnaagaccggtccggtaaactaggggggccaatt

SEQ ID NO: 7723 - DNA, 439 bp, Homo sapiens; identical to SEQ ID NO: 676
  misc_feature (1)..(439): n=a,t,g or c

SEQ ID NO: 7724 - DNA, 5724 bp, Homo sapiens
agtactgccaaattcgagacaatctccatgacctgacaatttaccttctatttgggtaatttattgtcccttacgcaaactctccaactgtcattgcacagacatatgatctgtatttagctctcactttaggtgtttccattgattctattctcactaatgtgcttcaggtatatccctgtctagaagtcagattggggttaaagagtctgtccgtgattgactaacagtcttaaatacttgatttgttgttgttgttgtcctgtttgtttaagaactttacttctttatccaatgaacggagtatcttgtgtcctggaccctttgcaagaacccttcccctagcaacagatgcgtcatctcaaaatatttttctgattggccaaagagtaattgatttgcattttaatggtcagactctattacaccccacattctcttttcttttattcttgtctgttctgcctcactcccgagctctactgactcccaaaagagcgcccaagaagaaaatggccataagtggagtccctgtgctaggatttttcatcatagctgtgctgatgagcgctcaggaatcatgggctatcaaaggtaggtgctgagggaatgaaatctgggacgatagactacgaagcattggagaaaagacctatggacatttggaagataatgtgtggagtgaaagaatagtgtgacaggtattatgtggtctcgacagaaagtataacaaattgtggtttggtggagttcttccctcaccacaaactgaagtaagtcaaatttggtttagagggtcaaaactgagttgtgtattgatgaatagcacggtcctgctacaagccaaactgggggtgggggtgggggtgggggaggaagaatattttctggcaagcattaacaagttatatttctgggctttaattattctttctggaaaattagtaaaattaaaaactaaaaaccacacatagttttgttagaattaaatgaaaaaaaaagttattagccctgttcttatctgaatacatgatacagtagttattttttggagtgtaaatcctgtcggtatatattgagcacatatattgtgttgaagattactagaaggaaaagtcatcaaaaagcaacaatttaccccaggaaaaggggagggaaggcatgctgatatgagttgcctcatgggacagtgatagccattccctgccttcccatctccatggtacagcagatcttatatcatgttaacttagtaatatttccaagagagtagaaaaataagtaaggaaatggggaatctgatattattgtctctcatctccagagcaacattggtgctgttgtaaagatgtactgtagaaaagtattcttcacccagcgtgacccccacagaaggtgtcaggtagacttggaataagcaaagtaataacccagctcccatacccatagtggcaattgtagatttctattgccccaaaagagccatacatagggatacttacctagaaagacagaggatcttcccttggtttgtgaagaggcagctagtatatttgtgtgtgtttgcatagatggaagtaaataaattcctaggtttatcaatacacagtcaaacatttaaaatctctcatcttggctgggcacggtggctcacgctaatcccagcactttgggaggccgaggcgggcggatcacgaggtcaagagatcgagaccgtcctgggcaacatggtgaaaccccgtctctactaaaatacaaaaaattagctgggtatggtggcacacgcctgtagtcccagctactcgggaggctgaggcaggaggattgcttggcccgggaggcggaggttgcagtgagctgagatggtgccactgcactccagcctggcgatagagcaagactccgtctcaaacaaccaaaccaaaacaaaacaaaatatctcaccttatctttgaagactaaggaaaaaaaaaatctcccactcatcgatacactccacagaggcagcatactctcccagtgtagctttctcttttcatgttcattattcccttggtgttggttattctcaatgtcaatcgtaacagaacatcttccataataacagtcccaatttaaggagcattaagataaaaggtggaattgccaaggtcaatccagacgagaaccttctcatagaggtaaccaccgtgtgggtttggatgctgggaagcagggggactatgacgctacaaggtctcagtcttaatttttggagtacttcagtccccaggtatattttccatagatttggcccttaaataaaaagaagcttctgactctaaaatgtaaacagtgcttgttacagtcttgttgatatattaagaaattactcaccttatctcatttaatcttaaaaacaaacccctgacaggatcaaaaccacagcaggactacataataggaaaactatacataaataggtagaataatctgctcaggatcactaggtaagttgctgaataagaattcaagatgaaaaagatcccagagtttaaaacccaacctttcaaacagtgtttccttcttcttagagtacaatgttctgagaaagagatcctctggaattctggcctaagtgtatttaatgcccgggtaaagaaagtgagagaacatttctctttaggggctgctgctggatttctaaaaagaaaataatttctcagctagtaacatggagccaaacaacagcttcacaagactctgggttctttagccctcatctccttcaatccaccctcttataaccagtccttcttgtttttcccctcccagctttgttcagcagcatgcccttcacccagaccttgtcttgtcactcatccctactcgccatcattctttcattcctcttggcccaatctctctccaccacttcctgcctacacgtatgtaggtcaccattcccctctcttgattccccccgcccaactctctttctccatttcttgcctttcagaagaacatgtgatcatccaggccgagttctatctgaatcctgaccaatcaggcgagtttatgtttgactttgatggtgatgagattttccatgtggatatggcaaagaaggagacggtctggcggcttgaagaatttggacgatttgccagctttgaggctcaaggtgcattggccaacatagctgtggacaaagccaacctggaaatcatgacaaagcgctccaactatactccgatcaccaatggtacctccctctctgctgcactcctggacacgggaatccatagtttgaaagtagttgcttcagctctttgtgttagattattgtaactgattttccctccaagggcctaaccttgccattaacaagccccaaattctcatgccagaggtctgagaactttatgggtttgatcctatcttgttgtgctcaagtcttgtctctgtcatccatggtctcctacgaagtcattgccctaagttcatgctaggggagccagaagggaagtccttggatatcttatacctcaatattggctcaatctcttggggagggggtgctgtcagagactgttatctgaggatgtgacatagacttctcagggcacaatttcaactactttttcagctttagggtttttagatacgtttgtaccacaattgagcatgggagggagaggggtgagcctaagcagtgacggctgattctgtcacgtctgtcatgtgtcccccagtacctccagaggtaactgtgctcacgaacagccctgtggaactgagagagcccaacgtcctcatctgtttcatcgacaagttcaccccaccagtggtcaatgtcacgtggcttcgaaatggaaaacctgtcaccacaggagtgtcagagacagtcttcctgcccagggaagaccaccttttccgcaagttccactatctccccttcctgccctcaactgaggacgtttacgactgcagggtggagcactggggcttggatgagcctcttctcaagcactggggtatggaccaacactcaatctcctttatttcaaggtttcctcctatgatgcttgtgtgaaactcggtgttctaactgtttcataatatctgctacaattaatataactgtcttctcctactatccagcttcctcctttttttaatctgtaattctctcaatacatcattctgtcttcctcttctttaatctatgaataacttttctctttctaaagaaccctacatttgattctgagtgttacttcttcccacactcattaccatgtactctgccttatctccccccagagtttgatgctccaagccctctcccagagactacagagaacgtggtgtgtgccttgggcctgactgtgggtctggtgggcatcattattgggaccatcttcatcatcaagggattgcgcaaaagcaatgcagcagaacgcagggggcctctgtaaggcacatggaggtgagttaggtgtggtcagaggaagacatatatggagatatctgagggaggaaaatcagggtggggaaaggaaatgtaatgcatttaagagacaaggtaggaacagatgtggctcttgatttctctttgctagaatgaatcagacattggtatcatctggtaccccaaagcttcagggtctgtcatccctttctatagacgggcaccttgatcacggctccagtcttagaaatcatctccagtacctaaaaccattgtttcacattagaatactgagtctagggatctagaaaatacattagaatatggagtctagggatctagaaaatactgagtctagggatctagaaaaataagcctcaagatttgggcacatcctagcttgtatttcctggggcaggtcatcagttcagaagcatttccagatcctggctcctttcaggttagggtcaattcgttgcatgaaatgggaatctcttagaggccaatgcctgcttttgcttctttagtctcaaatgtagtatgagaaactctaaaaaagggtaagacatggttgcttattatgttcagttggagagtaggaactaactgtatacagttagttcatgttggaaaggttagatgaacattgaaagaattttgcaaagtcaaaggattaagagagaagaggaaggaatctgaagcaaggagctcaaaacggatcttaaattccttggtaactatgtgtgtcttgctataggtgatggtgtttcttagagagaagatcactgaagaaacttctgctttaatgactttacaaagctggcaatattacaatccttgacctcagtgaaagcagtcatcttcagcgttttccagccctatagccaccccaagtgtggttatgcctcctcgattgctccgtactctaacatctagctggcttccctgtctattgccttttcctgtatctatttcctctatttcctatcattttattatcaccatgcaatgcctctggaataaaacatacaggagtctgtctctgctatggcccatggggcatctcttgtgtacttattgtttaaggtttcctcaaactgtgatttttctgaacacaataaactatttgatgatcttgggtggaatttttggtgtttaagccagttctttgggtggcggtggggggtggggagtcggtcctggggaatatatgtgatcctttcccggtaaaatatctgaatgttgaatttatcttataaattctagaattc

SEQ ID NO: 7725 - DNA, 232 bp, Homo sapiens
  misc_feature (1)..(232): n=a,t,g or c
agtganagttttntacactttattatgtacattgttggaaagggaggccacctggngaaacttctgcactggcactgtgttcctagagctccttctatgcggccctcccaagtgatttaatttcaggctgattggactacgaattcacaaggcagaaaagtcaaggtcatttggnatctggagacaggagaactcaaggaaccaaaagtactgttactctaagtctcagaaa

SEQ ID NO: 7726 - DNA, 185 bp, Homo sapiens
  misc_feature (1)..(185): n=a,t,g or c
attgtnaacagtgtttttatttatacctacaaaaagaaaacaagatggatgggtatcaaaaggacaatttacaaactaagaatagtaccatagctttcagcatcctgtgcctgaacatcacacatctacaagtctttcaagtcttaatgcaccaggaatgtgtctggagaccagcaagaacatca

SEQ ID NO: 7727 - DNA, 549 bp, Homo sapiens
ctcgcgctactctctctttctggccttgaggctatccagcgtactccaaagattcaggtttactcacgtcatccagcagagaatggaaagtcaaatttcctgaattgctatgtgtctgggtttcatccatccgacattgaagttgacttactgaagaatggagagagaattgaaaaagtggagcattcagacttgtctttcagcaaggactggtctttctatctcttgtattatactgaattcacccccactgaaaaagatgagtatgcctgccgtgtgaaccacgtgactttgtcacagcccaagatagttaagtgggatcgagacatgtaagcagcatcatggaggttgaagatgccgcatttggattggatgaattcaaaattctgcttgcttgctttttaatattgatatgcttatacacttacactttatgcacaaaatgtagggttataataatgttaacatggacatgatcttctttataattctactttgagtgctgtctccatgtttgatgtatctgagcaggttgctccacaggtagct

SEQ ID NO: 7728 - DNA, 433 bp, Homo sapiens
ccacgcgtccgggcggcttgtgcagcaatggccaagatcaaggctcgagatcttcgcgggaagaagaaggaggagctgctgaaacagctggacgacctgaaggtggagctgtcccagctgcgcgtcgccaaagtgacaggcggtgcggcctccaagctctctaagatccgagtcgtccggaaatccattgcccgtgttctcacagttattaaccagactcagaaagaaaacctcaggaaattctacaagggcaagaagtacaagcccctggacctgcggcctaagaagacacgtgccatgcgccgccggctcaacaagcacgaggagaacctgaagaccaagaagcagcagcggaaggagcggctgtacccgctgcggaagtacgcggtcaaggcctgaggggcgcattgtcaataaagcacagctggctgag

SEQ ID NO: 7729 - DNA, 382 bp, Homo sapiens
aacgattttcaccaactttattggctcccgccgggaccctcgccgcccacctccccgctagatgtcaccggccctccatgacatccagcacattcaaaagcattgcgggacgaccatgaaaagggcctttgctggcggacttcccttgagggcggcgtcagggtcatttgctcttcgtcttctgactctccgtcttcttgggcagcagcacggcctggatgttgggcaggacgccgccctgagcgatggtcactttgcccagcagcttgtttaactcctcgtcgttgcggatggcgagctgcaggtggcggggaattatcctggtcttcttgttgtcacgcgcgggttgccagccagctccaggatctccgccgtaaggtac

SEQ ID NO: 7730 - DNA, 350 bp, Homo sapiens
  misc_feature (1)..(350): n=a,t,g or c
taanaannttggatttagcggctgagtacttcctcttgtacatggcctttctggaatacatggcagatcgggaatacctgccaattcctctgacaaggacagggttgcggctgcaatggggcttccccttcttgggctttttagctttgaggntaccctttttcancttgccaccagcatcaaccttcttggcttcgggtttcttctctttagtatctggcttctcaactttttcacccgccatcttggatttagcggctgactacttccncttgtacatgggcctttctcattcccgtcctccggcctgggctacagaatgaggacttcttctaggcttgcgntttcca

SEQ ID NO: 7731 - DNA, 346 bp, Homo sapiens
cagatggagttttactcttgttgcccaggctggagtgcaatggcgtgatcttggctcaccgcaacctctgcctcctgggttccagcaattcttctgcctcagcctcccaaatagctgggactacaggcatgcgccaccatgcccagctaattttatatttttagtatagacgtggtttctccatgttggtcaggctggtcttgaactcccgacctcaggtgatccacccaccttggcctcccaaagtgctgggatttcaggcatgaggcaccacgcccagccttgaccttgcttttataaccaacccatgctcacaataactaatccactcccacaacaataacat

SEQ ID NO: 7732 - DNA, 430 bp, Homo sapiens
cttctcttaccgccatcttggctcctgtggaggcctgctggaacggacttctaaaaggaactatgtctggaaggctgtggtccaaggccatttttgctggctataagcggggtctccggaaccaaagggagcacacagctcttcttaaaattgaaggtgtttacgcccgagatgaaacagaattctatttgggcaagagatgcgcttatgtatataaagcaaagaacaacacagtcactcctggcggcaaaccaaacaaaaccagagtcatctggggaaaagtaactcgggcccatggaaacagtggcatggttcttgccaaattccgaagcaatcttcctgctaaggccattggacacagaatccgagtgatgctgtacccctcaaggatttaaactaacgaaaaatcaataaataattgtggatttgt

SEQ ID NO: 7733 - DNA, 532 bp, Homo sapiens
tttgaattgctgaatttttaatctgtaacacaaaggttgccaaacattcccccaaaggagcagctctcagtggggtggcggtggatgcgaaacagctgaagacgcggggcagttggcctggcttccgttgcacgggctggcttgccgcgggagatgggtgggtggggaggggtggggggactcgaggcaaccccccagagcggcctctgagcgcctaggaggaacctgaaggcgggaagggggaagatcgtcaggtcaaaggcgggagtctcagggcttatggggtggggaaggagggtctgggtggaaaggtacctcagggagcctaggaggctgtcagcgtgacgggggtgtttcggtacaaatggaggccttcagacctactgagtggggggctccagggttggggccgtcctcaggatggaaggatggtgggtctcggtatagggagacctctgggtggaaaggggctgcggggagaccgcagcagaggcgaaggtggaacctcagattggaaagtgtccgttggagc

SEQ ID NO: 7734 - DNA, 360 bp, Homo sapiens
  misc_feature (1)..(360): n=a,t,g or c
tttttgccaaccacagccacaaaggtttaatcagtttttatctcacaaggtagtaacaatgaggggcacagtggtggtcagggtggtggccccagtggcaacttaggggantatggcctcctccacanagccgntgcctggggaagatgntntcagggcacgaccacagcccagcanttgccccaccccantcaataaaaggctntagtgntctggtgggntntgcaccgtgcgcagatcctcctggngggcactggaggccagggagaaaaagagcctccccgcagcccagntccagcatgcaaggtgctagatttntcggcaattccacagggaaggacagtagccttttccctgccc

SEQ ID NO: 7735 - DNA, 1063 bp, Homo sapiens
cgaagcggagtgagaaggacggtcccgttcgtcacgaacgtccgtccctcgtccgtcgcggctcggacccggtccgggagagcagtggcggtggtgcggagagacgcagcggaggttttcctggtttcggaccccagcggccggatggtgaaatcctccctgcagcggatcctcaatagccactgcttcgccagagagaaggaaggggataaacccagcgccaccatccacgccagccgcaccatgccgctcctaagcctgcacagccgcggcggcagcagcagtgagagttccagggtctccctccactgctgtagtaacccgggtccggggcctcggtggtgctcctgatgcccctcacccacccctgaagatcccaggtgggcgagggaatagtcagagggatcacaatctttcagctaacttattctactccgatgatcggctgaatgtaacagaggaactaacgtccaacgacaagacgaggattctcaacgtccagtccaggctcacagacgccaaacgcattaactggcgaacagtgctgagtggcggcagcctctacatcgagatcccgggcggcgcgctgcccgaggggagcaaggacagctttgcagttctcctggagttcgctgaggagcagctgcgagccgaccatgtcttcatttgcttccacaagaaccgcgaggacagagccgccttgctccgaaccttcagctttttgggctttgagattgtgagaccggggcatccccttgtccccaagagacccgacgcttgcttcatggcctacacgttcgagagagagtcttcgggagaggaggaggagtagggccgcctcggggctgggcatccggcccctggggccaccccttgtcagccgggtgggtaggaaccgtagactcgctcatctcgcctgggtttgtccgcatgttgtaatcgtgcaaataaacgctcactccgaattagcggtgtatttcttgaagtttaatattgtgtttgtgatactgaagtatttgctttaattctaaataaaaatttatattttacaattttattccgg

SEQ ID NO: 7736 - DNA, 461 bp, Homo sapiens
tttttttttttcctttaaaaattttaatggacaggaaatggtatagaataactgccaagtcacataagttaacttttttgttaatgtttgtgatcccggaaagaacacactatcagtcgatgcaaaccgcatgggcgttttcatcagtcgttgtcttagcacatgaccgagtgtgggccacggacccatctttacttggtccagaaataaaagcggctgccatgtgtggaggctgcagatctccctcgatctcagggctgggatccggtcttggtcttgagtgatagggattctccggtaaaggtcgatctgttttcactttggtgacctttgacagttctcccaggtcaggccgcacccagcccagtttgtccagcacacactcgtcaaactttgcctgctgtttgcgacagtgacgaaataactgctggccagtataatcaatgcaagtccaatattct

SEQ ID NO: 7737 - DNA, 335 bp, Homo sapiens
tttttttttttttttttttttaaaattcaacagctttattgtgaaagaatccagagatctcacactgaaaaaatactaacacagctcatatataaattacttatctataagaacaattatagaaggaatctaaatggggcaattttaacaaaccaggcaaaatatcacatatacctgaatataaggtaactccaagccatgagtataagattaaggcagttactttattttgaacaaggaagtggcataagcaactcagtgtgtgccccttagggggggagctcttccccctaccactccccaccccaaggcatcattttggagaaaaaagtgtc

SEQ ID NO: 7738 - DNA, 468 bp, Homo sapiens; identical to SEQ ID NO: 3785

SEQ ID NO: 7739 - DNA, 229 bp, Homo sapiens
tttttttttgaaacaagtaaatcattggctttattctgggtcctggaagctccactgtgagtctgaaaaaaagacacaacaggggcggcactcgggggctggtgcagaaaatagtccctggctcctctggccctgggagcctaaagggcagtgaggagaaggcttagcaagaggcctggagcaggggaagtcaggtccctcaggaacccctcctcccccagaggaagga

SEQ ID NO: 7740 - DNA, 294 bp, Homo sapiens
cgggggttggttttcacatttttattgggagccgtgggaggggccgcctctgtcagtggaggtgctcacagtttcttcagccactccaggctggggccctgagggtcctgggggtggctgggcacgtcgggcatgttcccatcatcacggacgggcactgggtagttgtagggcgtggccttgttgatcatgacggagtacttgaagtaggggctcaatgggggcagaattacagcgaggcccccgacgacgaaggacacgaccagcactggctccttgtcccaggcattcttt

SEQ ID NO: 7741 - DNA, 194 bp, Homo sapiens
aatgagacagtcttgctctctgtgacccaggctggagtgcagtggtgtgatcacagctcactgcagccttgacgtctcctgagtaactgggaccacatgcatgcaccatctgtctggctatttattttttttgagagacaacgtcttactacattgcccagtcctatctcaaacatctgggctcaagcaatccg

SEQ ID NO: 7742 - DNA, 319 bp, Homo sapiens
tagcattttggttatttttagttaaagaaaaacagctttctccaagggcgacaaagtgaactgaaggtcagaaggaagctgggtgcgggcttcctgcaagctcttgctccaaaacctggaattaagaaaaggccgccccgaagctctgggaaagtttggtacacacggggttcccttgtgggggagaaaagccgccaagccacacacggtcactggattggtgtgagtgggttccaagcgactgccatgtgctagtccactgacatgattgacattaacattcttggggggcattaaattaaggaatgacacagggagc

SEQ ID NO: 7743 - DNA, 401 bp, Homo sapiens
tgaaaggtttaaacgctttattgtgcccaaaaaaaggcccatggaatgaagggaagagccgcgcagccgtgagccgggagcgattgtttgtcgcgcacccaaaggcaaggagggtggggagctgggaaaggatgcgcggcctccggtgccccgcgcgccatgggcccggccaaccagcgaccccgcccggtggcgaggcgcggcctcggccatcggcgccctaggggccagtaaccatgacgacggccgttgccaaggccgagagccaatagaggcgtcgcgggcgctgtttcaaaaacctaaagcaaacaacgaaaaacgctacatcgttgggggaggggaaagactgagaggacccggggcccctccctgaggctcagaccaggcctcgcggccccggc

SEQ ID NO: 7744 - DNA, 288 bp, Homo sapiens; identical to SEQ ID NO: 4925

SEQ ID NO: 7745 - DNA, 165 bp, Homo sapiens; identical to SEQ ID NO: 1025

SEQ ID NO: 7746 - DNA, 1452 bp, Homo sapiens
cggggaggacggtctgcatactcgctgcccgccggctccctcccccgcgtccctgcgaccgccgcggcgaagatggcctcaggagtgcaagtagctgatgaagtatgtcgcattttttatgacatgaaagttcgtaaatgctccacaccagaagaaatcaagaaaagaaagaaggctgtcattttttgtctcagtgcagacaaaaagtgcatcattgtagaagaaggcaaagagatcttggttggagatgttggtgtaaccataactgatcctttcaagcattttgtgggaatgcttcctgaaaaagattgtcgctatgctttgtatgatgcaagctttgaaacaaaagaatccagaaaagaagagttgatgttttttttgtgggcaccagaactagcacctctgaaaagtaaaatgatctatgcaagctccaaggatgcaattaaaaagaaatttcaaggcataaaacatgaatgtcaagcaaatggaccagaagatctcaatcgggcttgtattgctgaaaagttaggtggatccttaattgtagcctttgaaggatgccctgtgtagattattcagtgccacaaattgaaagcttccatgtttaatgttatcctcttgctatataaataaagcaaatatatttaggccagggtctcactgagggggagctgtcttgtcatcttttagagtaaactattctataaacatatgcaaacagccctaaataaatctaaagtctaaagttttattgatgtgaaattaaattcttattggccaaatgcctgttttgatgagttgatttataaagatttttgttaagctcaggattttaaattacacagttcacaaacagtaaaggccatgtgaagagaattattacatctttattaacctcagcatttactttgtttcttttgcttaggaaattgctcataatctggttataattttggtccaaattctttattcttccttgagctaagcagaataatggaatataatatgtcttcataatataacaacactaatacactaatagtaagattaagttaggcagtcttctaccaaatgtgtaatggagattgcctcaaaattgtgtccacataatccacgctcatcttgcaaagcgctatttcaggcacatcattggaatacaggaagtagccctgcacctgccagtgagctcgccattcactgattggaagagtgacctggcatcttggaaatcattgtgtgtcttcaggagaatgtgcagtgtcttgtaacaactaattaataatgcaaattagggctacattgtaatctgctttgttaatgaaaatgataaaacagaatattgacaagctaggacacctgtggtatctttaattgtatctccttcagaagtttgcttcttatggtataataaagtatggaagaataaaaaaaaaaaaaaatctagagtcgccg

SEQ ID NO: 7747 - DNA, 2000 bp, Homo sapiens
tttgggctgtgtgtgcgacgcgggtcggaggggcagtcgggggaaccgcgaagaagccgaggagcccggagccccgcgtgacgctcctctctcagtccaaaagcggcttttggttcggcgcagagagacccgggggtctagcttttcctcgaaaagcgccgccctgcccttggccccgagaacagacaaagagcaccgcagggccgatcacgctgggggcgctgaggccggccatggtcatggaagtgggcaccctggacgctggaggcctgcgggcgctgctgggggagcgagcggcgcaatgcctgctgctggactgccgctccttcttcgctttcaacgccggccacatcgccggctctgtcaacgtgcgcttcagcaccatcgtgcggcgccgggccaagggcgccatgggcctggagcacatcgtgcccaacgccgagctccgcggccgcctgctggccggcgcctaccacgccgtggtgttgctggacgagcgcagcgccgccctggacggcgccaagcgcgacggcaccctggccctggcggccggcgcgctctgccgcgaggcgcgcgccgcgcaagtcttcttcctcaaaggaggatacgaagcgttttcggcttcctgcccggagctgtgcagcaaacagtcgacccccatggggctcagccttcccctgagtactagcgtccctgacagcgcggaatctgggtgcagttcctgcagtaccccactctacgatcagggtggcccggtggaaatcctgccctttctgtacctgggcagtgcgtatcacgcttcccgcaaggacatgctggatgccttgggcataactgccttgatcaacgtctcagccaattgtcccaaccattttgagggtcactaccagtacaagagcatccctgtggaggacaaccacaaggcagacatcagctcctggttcaacgaggccattgacttcatagactccatcaagaatgctggaggaagggtgtttgtccactgccaggcaggcatttcccggtcagccaccatctgccttgcttaccttatgaggactaatcgagtcaagctggacgaggcctttgagtttgtgaagcagaggcgaagcatcatctctcccaacttcagcttcatgggccagctgctgcagtttgagtcccaggtgctggctccgcactgttcggcagaggctgggagccccgccatggctgtgctcgaccgaggcacctccaccaccaccgtgttcaacttccccgtctccatccctgtccactccacgaacagtgcgctgagctaccttcagagccccattacgacctctcccagctgctgaaaggccacgggaggtgaggctcttcacatcccattgggactccatgctccttgagaggagaaatgcaataactctgggaggggctcgagagggctggtccttatttatttaacttcacccgagttcctctgggtttctaagcagttatggtgatgacttagcgtcaagacatttgctgaactcagcacattcgggaccaatatatagtgggtacatcaagtccatctgacaaaatggggcagaagagaaaggactcagtgtgtgatccggtttctttttgctcgcccctgttttttgtagaatctcttcatgcttgacatacctaccagtattattcccgacgacacatatacatatgagaatataccttatttatttttgtgtaggtgtctgccttcacaaatgtcattgtctactcctagaagaaccaaatacctcaatttttgtttttgagtactgtactatcctgtaaatatatcttaagcaggtttgttttcagcactgatggaaaataccagtgttgggtttttttttagttgccaacagttgtatgtttgctgattatttatgacctgaaataatatatttcttcttctaagaagacattttgttacataaggatgacttttttatacaatggaataaattatggcatttctattg

SEQ ID NO: 7748 - DNA, 283 bp, Homo sapiens
  misc_feature (1)..(283): n=a,t,g or c
gatcttgtaccaagccaacgggtntcctggctctcctgcccacaggatgaacattttcggcttccttaggagttttgccctaccgtattccaaagcgtgtgctggtttctcatattgtctgtaggctcactcagcccgcagtttatgtgtgtgcttttttctatgaaaaatgatgtattttgctacttcctgtgtacaaagttttattgtaaatgttttttgtgctttgcatgaacaggggccacgttgttgcaattgtttcagtagaactggtttgatttct

SEQ ID NO: 7749 - DNA, 421 bp, Homo sapiens
tttttggagttccagtgggcttttattgagataaattaacaaaaaccaagattttaccatatttttggaaccttataaactcagcagactccggtccatatatgcgtacatacaacataacacatcccaacaaaaacagagcccccccgccccactggaacatctgccaattaagagaaagccaattttcccttcccccaatgtttctgaaattttgagttcccactgttcacttctcagtggaactggtcccttgtggctagggacattggaattctctaccatttttactgaacaaaaaataattttttttcctgtttcaaaaaagggaatagtgactttgttttctccaggctccccttcccccacaaccaatgtaaaattacagcagcctgtatcttaataacccagccctacccct

SEQ ID NO: 7750 - DNA, 503 bp, Homo sapiens
  misc_feature (1)..(503): n=a,t,g or c
ttttntttaatttaaagtttattnactttgaagtaaccaacnttaaannttggcctgagttaagtgtattaaaaagaagaaatacgtcgtaagatggcagtataaattcatctctgcatgtagaaaccggaaaaaaagcaagttcagtacttcaccaaaaantttcaacattgcaaacacaggaanttgagaactgacaancagaantactaggangtgcaaagtcttgaagctccaanacaanaacagcantcttggaagggcccctantctacctcctcantggtggggnctgacccaggaccctcccttgggaccctgagccccgaagcccccaggnccggggaccaccggcnaccctgggtgcagtccgctgntgatgggggttacacacctgntccagntccttcctcttgtgnttcaaactcggtccttntcgggccaagggtnttgggggtccagcacggaggatggacctntttggacacttgttccggnacctt

SEQ ID NO: 7751 - DNA, 461 bp, Homo sapiens
ttagatatttgaaatacaactttattctgattctaaacgaaaaggaatgggaatgacagtaacaaacaagatttcaccactgaatattgtgatgtgactgcagcagtcttatatatgaaactcaaggaatcaactgcgttccaaaacagctaaatatgcaggtccaaacaatgaagttattttttaaactgccacattcactccgaagcccactcatctccttcagcatcccacagatgaagcacatgttccgcttagctagataataatgaggtggcacacaccgctgcacccgctgacatcacaggacagctgcctataaaactagacttctgacgctgggctccagcttcattctcacaggtcatcatcctcatccgggagagcagttgtctgagcaacctctaagtcgtgctcatactgtgctgccaaagctgggtccatgacaacttctggtgggg

SEQ ID NO: 7752 - DNA, 2519 bp, Homo sapiens; identical to SEQ ID NO: 1002

SEQ ID NO: 7753 - DNA, 350 bp, Homo sapiens; identical to SEQ ID NO: 4347

SEQ ID NO: 7754 - DNA, 400 bp, Homo sapiens; identical to SEQ ID NO: 3490
  misc_feature (1)..(400): n=a,t,g or c

SEQ ID NO: 7755 - DNA, 275 bp, Homo sapiens
  misc_feature (1)..(275): n=a,t,g or c
cacctgttgtcttattgacaaacaggtaggccctatagcaacaggcctggaggtcctgcagtagtgggggaaaatggaaggtggagggtggagtttttcctgcaggacagctgagtggagggtggggacaggtgcaaactggagaggcctagagagctagagaagcaagtaagggccagggccagagtcggtttcattggaacaacagcccattncccttaaggccccttaatttttgtcttggcttttttcttagaccccaagccaggtttttt

SEQ ID NO: 7756 - DNA, 324 bp, Homo sapiens
  misc_feature (1)..(324): n=a,t,g or c
ccccaatacaatcaatcacctttattcccggttagaacamggccgtgcacactgcagacagaagagcacaagwtcsgggcaatctcacagcaatatacggcgcsggbgggcaggttagtctttttmgattatttcsccttacagagaaactactagactcygcyygaaaagaacccygyctctcttctcccatttnttccatagaacggctccttattctctctctcactctaaygtaacatatcccaaccgsacggacagttcatgctcattccccccacccaattctacacgtatctctctcttcttacgsgagaagccagm

SEQ ID NO: 7757 - DNA, 770 bp, Homo sapiens
aggacacctttggattaataatgaaaacaactactctctgagcagctgttcgaatcatctgatatttatactgaatgagttactgtaagtacgtattgacagaattacactgtactttcctctaggtgatctgtgaaaatggttcgctattcacttgacccggagaaccccacgaaatcatgcaaatcaagaggttccaatcttcgtgttcactttaagaacactcgtgaaactgctcaggccatcaagggtatgcatatacgaaaagccacgaagtatctgaaagatgtcactttacagaaacagtgtgtaccattccgacgttacaatggtggagttggcaggtgtgcgcaggccaagcaatggggctggacacaaggtcggtggcccaaaaagagtgctgaatttttgctgcacatgcttaaaaacgcagagagtaatgctgaacttaagggtttagatgtagattctctggtcattgagcatatccaagtgaacaaagcacctaagatgcgccgccggacctacagagctcatggtcggattaacccatacatgagctctccctgccacattgagatgatccttacggaaaaggaacagattgttcctaaaccagaagaggaggttgcccagaagaaaaagatatcccagaagaaactgaagaaacaaaaacttatggcacgggagtaaattcagcattaaaataaatgtaattaaaaagaaaaaaaaaaaaaaaaaaaaaaaaaaaaaaaaaaaaaaaaaaaaaa

SEQ ID NO: 7758 - DNA, 1115 bp, Homo sapiens
ctctaaagccgccatggagcgcgcgtcgctgcgcgccctgctcttcggccccgctgggctgctgctcctgctcctgcccctctcctcttcctcctcttcggacacctgcggcccctgcgagccggcctcctgcccgcccctgcccccgctgggctgcctgctgggcgagacccgcgacgcgtgcggctgctgccctatgtgcgcccgcggcgagggcgagccgtgcgggggtggcggcgccggcagggggtactgcgcgccgggcatggagtgcgtgaagagccgcaagaggcggaggggtaaagccggggcagcagccggcggtccgggtgtaagcggcgtgtgcgtgtgcaagagccgctacccggtgtgcggcagcgacggcaccacctacccgagcggctgccagctgcgcgccgccagccagagggccgagagccgcggggagaaggccatcacccaggtcagcaagggcacctgcgagcaaggtccttccatagtgacgccccccaaggacatctggaatgtcactggtgcccaggtgtacttgagctgtgaggtcatcggaatcccgacacctgtcctcatctggaacaaggtaaaaaggggtcactatggagttcaaaggacagaactcctgcctggtgaccgggacaacctggccattcagacccggggtggcccagaaaagcatgaagtaactggctgggtgctggtatctcctctaagtaaggaagatgctggagaatatgagtgccatgcatccaattcccaaggacaggcttcagcatcagcaaaaattacagtggttgatgccttacatgaaatagccagtgaaaaaaggtgaaggtgccgagctataaacctccagaatattattagtctgcatggttaaaagtagtcatggataactacattaccctgttcttgcctaataagtttcttttaatccaatccactaacactttagttatattcactggttttacacagagaaatacaaaataaagatcacacatcaagactatctacaaaaatttattatatatttacagaagaaaagcatgcatatcattaaacaaataaaatactttttatcacaaaaaactttagag

SEQ ID NO: 7759 - DNA, 257 bp, Homo sapiens
ttactcttatggtttttattttcctatctgacatttctaacattagccatgtagacggagttaaaaagaatccaccgcacgaaaggtaaacaaagcagaccctcagaaactccctggcaaggaagaacccctccccagattggcccagtttcaccagcaactggtctcagctcagccttatgcctttccactgacaccccccacccctccacattctcgatgattcagaccaggaacttctcggctgattgtgtccg

SEQ ID NO: 7760 - DNA, 692 bp, Homo sapiens
cccgcgcaggcgcagacggtggaagcggacgcaacatgccagtggcccggagctgggtttgtcgcaaaacttatgtgaccccgcggagacccttcgagaaatctcgtctcgaccaagagctgaagctgatcggcgagtatgggctccggaacaaacgtgaggtctggagggtcaaatttaccctggccaagatccgcaaggccgcccgggaactgctgacgcttgatgagaaggacccacggcgtctgttcgaaggcaacgccctgctgcggcggctggtccgattgggggtgctggatgagggcaagatgaagctggattacatcctgggcctgaagatagaggatttcttagagagacgcctgcagacccaggtcttcaagctgggcttggccaagtccatccaccacgctcgcgtgctgatccgccagcgccatatcagggtccgcaagcaggtggtgaacatcccgtccttcattgtccgcctggattcccagaagcacattgacttctctctgcgctctcctacgggggttggccgcccgggccgcgtgaagaggaagaatgccaagaagggccagggtggggctggggctggagacgacgaggaggaggattaagtccacctgtccctcctgggctgctggattgtctcgttttcctgccaaataaacaggatcagcgctttaaaa

SEQ ID NO: 7761 - DNA, 628 bp, Homo sapiens
  misc_feature (1)..(628): n=a,t,g or c
ggattgcaaaaatttattaaaattggagacactgttttaatcttcttgtgccatgagactccatcaggcagtctacaaagaccactgggaggctgaggatcacttgagcccagaagtttgaggctgtagtaagcttcaaaggccactgcactctagcttgggtgaggcaagaccctttcaagcagtaagctgcatgcttgcttgttgtggtcattaaaaaccctagtttaggataacaggtctgcctgcatttcttcaatcatgaattctgagtcctttgcttctttaaaacttgctccacacagtgtagtcaagccgactctccatacctttaaaaggtatgacaggaactgtcttcatgtccttacccaagcaagtcatccatggataaaaacgttaccaggagcagaaccattaagctggtccaggcaagttggactccaccatttcaacttccagctttctgtctaatgcctgtgtgccaatggttgagttaggcttgctctttaggacttcagtagctattctcatccttccttggggacacaactgtccataangtgctatccagagccacactgcatctgcacccagcaccatacctcacaggagtcgactcgtgccgaat

SEQ ID NO: 7762 - DNA, 303 bp, Homo sapiens
  misc_feature (1)..(303): n=a,t,g or c
ttcnntaaacatgtagatttattttaagtcagtttggtacatgatacagattggttttgcngtttttaatgaactganatagaaatgtctnactncngcagtatctgcctgtgcaacaaatatctgtaaggtaaaataaggtatttgatagaagaacatctgcaagaacaaatcagatgaaaaatctgaaaaggtttctatataccttctggattttaaaaaaacccaaaaattnatggctcaaganactacattgcnaaaagttcggggnnaaaagtnnaaaaggctgtgagttcccgttgc

SEQ ID NO: 7763 - DNA, 405 bp, Homo sapiens
tttttttgcaggtcagaggctgtttctttatacaaaggcagacaacatggacacctcagcatgctgctgcagttcatgggggcccatcccaccgcttctggggagaggaatcggggtgggggcgcccgcagcaggggagagacactacacaggcctgggaccgccaagcacaccagctgcgagctcctgaagggcagacacatggacacacggacactgaaaccacgagcatggcacagccacagggaggaatggtggagctggggacagacatcggcagctactgccaactgctgccctcttctgccacgagttccttggcgaggagcttgtccgtgttactaaagagccacgtgactttatctgatggcagaacgtctcgctttctgcatctgtaagctgggc

SEQ ID NO: 7764 - DNA, 345 bp, Homo sapiens
attttttttttttttttttttttttttttttaaagtctttagtatatttatttgtataaagagtaaacaaagtgcatatagagtggccacaggtttgacacagagaccttggtgatgtaggctatgaacaaatttaaatggcaacttcattgctgccactgaaccaatcctgaatttgggctcaacaggtgaaaagtaacaatatcaaacgaatactaaacagcataacaaaaagattttcagactcttggtcataaagaccgtaatcgttcacattgaatcaatgactaaacatttttgattacccagctacctccaagcaaactgaaaactgtctagtggatc

SEQ ID NO: 7765 - DNA, 505 bp, Homo sapiens
ttagtttaatagacatttattccttcagttgaacaacctctacacaattaaaatgtatgacttaagatcttttctttttttgtgaagaaatttaggtctcaagaacttttatgaacttgctatgagtacttcctggaaatcaattaactgagtcttttgaaacccctagagaagataggagaaaattggttcagaacgagcatttaaattaagtcagcaaagtcagaatttaaaattgggcaattccttgtctacattttctttacactcaaattgaccctggacaacagtagtctagtctcctggaagacatggtgcaaacagaaatgcaatgtggtggtatactcatagtcaaagtgggtgcacaagtgatggtccaactttgtggaatggtaaggatttttagggttgtttggccagaacaagagaaataactgcagaaaacacatatggttggaaacatgcgcttgtgactttttctgtagcctatgggagtggacagagt

SEQ ID NO: 7766 - DNA, 261 bp, Homo sapiens; identical to SEQ ID NO: 763
  misc_feature (1)..(261): n=a,t,g or c

SEQ ID NO: 7767 - DNA, 359 bp, Homo sapiens; identical to SEQ ID NO: 540
  misc_feature (1)..(359): n=a,t,g or c

SEQ ID NO: 7768 - DNA, 458 bp, Homo sapiens
aaaatttgaacaagtatttatttcttaaaatttacttaagggattagagctaatatataatagaacatttaatataacatttggagttatgtcaacataaaaatagctgtggttacaattagcacatgcaattcactgcaaaggtaaaaatacatgctatactctagacaagccttccaaatgaagttagagtagatggggtaaaacagcaagtgaacatgaaaggattgcacttagaagaaagtgggacatagctaggatataaaagaaacatacctaatgctagtcagtcactgcattgtcctactagcaaattgcacatttatttttagagtatattcaatacacatacatatttgagactagagaattttcaaatatctacctttgaaatatccctttggtttctaacacatcacattatggtattaatgtaacagcacttaaaacctgtagtt

SEQ ID NO: 7769 - DNA, 438 bp, Homo sapiens
gactgctacattttactttattttgttgtaaggaaaaccaattgactaagttgtccccaaaatgttagtgttcactgatcaagaaggaaatgaggtcagaaggcaaacttttcacttcttctcaaacataaattgcaagtatcacagaaaattgtaacaacacatgcaacacgggatggctttcaacacacagagagcctaagcaagaagagtgagtactgaaggtctacagaggtcagactgggagcactaccacaggaagtttgaatctatccacgcagctctttcctcccacagtccaggctcaacacctcttcctattccaaggtggcttatccatatgcagaaatccaggctgttccatatacattaatacttgcccagctgtgtttcacgaggcatctccataagccaagccccgactcaaattctgtacag

SEQ ID NO: 7770 - DNA, 2717 bp, Homo sapiens; identical to SEQ ID NO: 789

SEQ ID NO: 7771 - DNA, 228 bp, Homo sapiens; identical to SEQ ID NO: 735

SEQ ID NO: 7772 - DNA, 447 bp, Homo sapiens
  misc_feature (1)..(447): n=a,t,g or c
ggaaattcagtaagtactttatttatgagtaaggctgtacaggattcagcagtgtctaattcgggtcccatatagaagttaaaatttttaaatgagtaattcagcttacagggaaatatattttcatctcaatcttttatgctatatcatacctcaggctttttaaaaattatttttgagatgaaattttaaagttcccccggtacccaagtaaccatattatatagtataaagatagtgaaatacaaaaatgtaacaaatactaatacactgtgattaatagctgtttattagctttttaataaagcaaaactttatagtgaaataaactagaaatagctttttattttttatatatatttatttatttttgagatggggtcttgctctgttgcccaggggtggagtgcagtggccaatcntgggtcactgcagcctctgcctcca

SEQ ID NO: 7773 - DNA, 5926 bp, Homo sapiens; identical to SEQ ID NO: 247

SEQ ID NO: 7774 - DNA, 161 bp, Homo sapiens
  misc_feature (1)..(161): n=a,t,g or c
tcacaattgtnaggntattttattggccccatgacatccagtgacagtgtgggagcaggctactctccagggacatgtttttggaggcatatggagaagggggcccaggcgaggtggctcacacctgtaatcccagcactttgggaggtcgaggtgggagg

SEQ ID NO: 7775 - DNA, 358 bp, Homo sapiens
ttttggcttttaaaataacctttattttttaaaagttagtatgtgcattataggaaattgaaaaacacaagcaaagaacaaagtcattcacaatcacaagcagtttatagtttgacatattcttctagatcctgtgtgtaggcacaacatccaattttatgggactgagactgtacagtatgtatcatgatttttcacacatcatgaatatttaccaattcaaaatcccaaagctatatgagtattctgataaccaagagtacactacaccaactcaaactgctaaaaaaaaaaaaaaagatgtaatcctgcctttcttgggacagaaatttcatataagacaaaaatggcaacatgc

SEQ ID NO: 7776 - DNA, 316 bp, Homo sapiens
gtgatacagtctagtgtttattttatgttatggaaggtacacttgaatttcaaaaatttaaaacatatataavmvgbggttagggactaacatttgtatcamcagttgataaatgtctaagattgtttattatacagcagggtacaatggtagtgctaatgccaacagggcaccatggaagttagtctaaaaattatcgctaggctttatacaagcacaacatatgctgctgctcttagaatttbgggaaatgayctgcttctaatactaagcmgttctttmacattttbmmatgttatacagtgttacagtattt

SEQ ID NO: 7777 - DNA, 344 bp, Homo sapiens
  misc_feature (1)..(344): n=a,t,g or c
ttttttttttttttttttttttttgtggnggagctagctgaggttttattttggaccaaaaaaaaaatnacaattnttttctagctggaagcatgggcaaggggggtccccagacagtaaactcccccacgggtgggttgagcctcaggtggggggtctcctgttgtctgtgcttccccacacagcagcctccctcctggngtntntggcagccacgggaggggcagtactaggaggagctgccacanttnttcacttgggcaggaagtcagaggactcagacaccagnttcccatcgcgggtttcgatcttcttcanaaccacggccctggtggagntggtgc

SEQ ID NO: 7778 - DNA, 852 bp, Homo sapiens
tctctctctctctctctctctctggtgaacaggacccgtcgccatgggccgtgtgatccgtggacagaggaagggcgccgggtctgtgttccgcgcgcacgtgaagcaccgtaaaggcgctgcgcgcctgcgcgccgtggatttcgctgagcggcacggctacatcaagggcatcgtcaaggacatcatccacgacccgggccgcggcgcgcccctcgccaaggtggtcttccgggatccgtatcggtttaagaagcggacggagctgttcattgccgccgagggcattcacacgggccagtttgtgtattgcggcaagaaggcccagctcaacattggcaatgtgctccctgtgggcaccatgcctgagggtacaatcgtgtgctgcctggaggagaagcctggagaccgtggcaagctggcccgggcatcagggaactatgccaccgttatctcccacaaccctgagaccaagaagacccgtgtgaagctgccctccggctccaagaaggttatctcctcagccaacagagctgtggttggtgtggtggctggaggtggccgaattgacaaacccatcttgaaggctggccgggcgtaccacaaatataaggcaaagaggaactgctggccacgagtacggggtgtggccatgaatcctgtggagcatccttttggaggtggcaaccaccagcacatcggcaagccctccaccatccgcagagatgcccctgctggccgcaaagtgggtctcattgctgcccgccggactggacgtctccggggaaccaagactgtgcaggagaaagagaactagtgctgagggcctcaataaagtttgtgtttatgcca

SEQ ID NO: 7779 - DNA, 942 bp, Homo sapiens
ctttccgctcggctgttttcctgcgcaggagccgcagggccgtaggcagccatggcgcccagccggaatggcatggtcttgaagccccacttccacaaggactggcagcggcgcgtggccacgtggttcaaccagccggcccgtaagatccgcagacgtaaggcccggcaagccaaggcgcgccgcatcgccccgcgccccgcgtcgggtcccatccggcccatcgtgcgctgccccacggttcggtaccacacgaaggtgcgcgccggccgcggcttcagcctggaggagctcagggtggccggcattcacaagaaggtggcccggaccatcggcatttctgtggatccgaggaggcggaacaagtccacggagtccctgcagaccaacgtgcagcggctgaaggagtaccgctccaaactcatcctcttccccaggaagccctcggcccccaagaagggagacagttctgctgaagaactgaaactggccacccagctgaccggaccggtcatgcccgtccggaacgtctataagaaggagaaagctcgagtcatcactgaggaagagaagaatttcaaagccttcgctagtctccgtatggcccgtgccaacgcccggctcttcggcatacgggcaaaaagagccaaggaagccgcagaacaggatgttgaaaagaaaaaataaagccctcctggggacttggaatcagtcgggcagtcatgctgggtctccacgtggtgtgtttcgtgggaacaactgggcctgggatggggcttcactgctgtgacttcctcctgccaggggatttggggctttcttgaaagacagtccaagccctggataatgctttactttctgtgttgaagcactgttggttgtttggttagtgactgatgtaaaacggttttcttgtggggaggttacagaggctgacttcag

SEQ ID NO: 7780 - DNA, 309 bp, Homo sapiens
gggtagactgcagtcctccatcctagctttcggtcacacccctcaggactccccagggctgaagctgggatcccggccagccaggtgacccccacgctctggatgtctctgctctgttccttccccgagcccctgccccggctccccgccaaagcacccctgcccactcgggcttcatcctgcacaataaactccggaagcaagtcagtctggctcctggctgtctgcgctgtcatcacccgtcctgggcctggcctggccacccggacctccccctctaaaatctcagcctgacgtcaacaaaggaac

SEQ ID NO: 7781 - DNA, 459 bp, Homo sapiens
  misc_feature (1)..(459): n=a,t,g or c
aagactaaacagatttttattttatttcatctgctaaatgtcagagagcaagttagacacacattccactaagcatcaaaggccctcgtagtctcggtggaaggacaaactccagctccacatcactggtttaagtttcttcctcttcttcttcctcttcttcctcctcctcttcctcctcatcttcatcagagctgaaggtgccatcagggaggctgtagacacggatgacctgcttgttggggtccttgaggatgaggtatttgccctcctccagcttcatgcagatgtcaatgacgcagcgtaaaatgccccagggatttctccacgctcaggttgatctgggctggcaaactcattaggcttgaactgctgggtgcctagggtgacgtggcntgaggagtctttcacgtggtaccgagacacataaccaaggttgaggtactcagatccagccag

SEQ ID NO: 7782 - DNA, 365 bp, Homo sapiens
ctgtaatagtcagcatgacctctattttattgattgattgatggattgattgagacagagtttcactcttgttgcctaagctggagtgcaatggcacggtttcagctcactgcaacctcggtctcccaggttcaagcgattctcctgcctcacactcccaagcagctgggattacaggtacccgccaccatgccaagctaatttttgtatttttagtagagacggggtttcaccatgttggtcaggctggtctcaaactcctgacctcaggtgactgcccaccttggcctcccaaagtgctgggattataggtgtgagcaccacacccgaccagcatgacctttaaacacaattggacttaagac

SEQ ID NO: 7783 - DNA, 521 bp, Homo sapiens; identical to SEQ ID NO: 635

SEQ ID NO: 7784 - DNA, 442 bp, Homo sapiens
  misc_feature (1)..(442): n=a,t,g or c
ggaaatatttatttgataagatggaaataaattaataagctgagattcattgaaattcaacattttaaaaatcaaagtaagatataaaatgggagaaaatattgaaaatacataggatatgtatctttttatatttnttgtactttaagttttagggtacatgtgcacaacgtacagcttagttacacatgtatacatgtgccgtgttggtgtgctgcacccattaactcgtcatttaacatcaggtatatctcctaatgctatccctccccgntcaccccaccccacaacaggccccggtgtgtgatgttccccttcctgtgtccatgtgttctcattgttcantttccacctatgaatataaggtttcttacaagtcaatgaggggntaaacccattaaaanttgggcaaaaggcttaaacctttccaantagggnaatt

SEQ ID NO: 7785 - DNA, 374 bp, Homo sapiens; identical to SEQ ID NO: 2968

SEQ ID NO: 7786 - DNA, 115 bp, Homo sapiens
  misc_feature (1)..(115): n=a,t,g or c
ttttttttttttttgacctggagnagaattctttttattacgagtgaacagatggaactaaggtaagcgggtctcagccttccgctggtgcagcatctccacgcagggcctcagc

SEQ ID NO: 7787 - DNA, 142 bp, Homo sapiens
ccagataatcttggtttattatttctataattgtcacatccaaactggcacaggcaaggaggaccaagtgtgttttccccttctctgtgttgccaatctttctctctctctccctctccctccctcccctcccctttcctcc

SEQ ID NO: 7788 - DNA, 441 bp, Homo sapiens
actcccactctgatgtcccgtgcctggcatcttctgctttgaactgtaacccacactgattgtcccctctgtttcctttcacagaaagcattctgctctttccagatctacgctgtgccttggcagggcacaatgaccttgtcgaaatccacctgtcaggacgcctaggggtctgtaccgggctggcctgtgcctatcacctcttatgcacacctcccaccccctgtattcccacccctggactggtggcccctgccttggggaaggtctccccatgtgcctgcaccaggagacagacagagaaggcagcaggcggcctttgttgctcagcaaggggctctgccctccctccttccttcttgcttctcatagccccggtgtgcggtgcatacacccccacctcctgcaataaaatagtagcatcgtcctctgagtctggcg

SEQ ID NO: 7789 - DNA, 407 bp, Homo sapiens
ttactgttatcactacaaattttattcagaaacccatctttgtatgtttttttttttgttgttttttaaaaaaaattccccttatgaactggtttggtcaatcaactacaacactttctagcagacataaggtaaaaatggcatggctcagaatcgcccagatctttcacgatctctcgaccgcctcctgtcacgctcccgtccgccgccacctccaccaccgccaccgccaccgccacgaccacggtctctagaccgagaacgacgctcccgggatcggaatcttgatctatgcttcttgcgacggcggccatacagctcccgccgcagctctctgggaaatgggcttcaaatgcatgaagttgcagaagccgcctcgtgtgcattctcccatctcatactgacgg

SEQ ID NO: 7790 - DNA, 473 bp, Homo sapiens
tctgttcaaaacagtttattttattttatttttttttttgtcagacaaacacattgatttctggaccacagtagaggatggaaacctttcacaaacttatttatttgaaaatacaaatataaaattatactttccacatctgtgatgtgagagactgccatccacatagtaattttttacaacagggctttaagaaagccacacacaaagacctgaaagatgcttgagatatatatatagatagtacatatatatgtatatatataaaaaaaatactcactaccaaagttctcatcagtttcatactaaagtataaaagtaagggtgaggtcagccacagtgctagggaaagttttatttagatacatttatgtccacatgaaacgcttagacttgcatcctattacatatggaattcggagtttacaatacaccatgaacggcagattggctagcccacgctacttaagagg

SEQ ID NO: 7791 - DNA, 1120 bp, Homo sapiens; identical to SEQ ID NO: 686

SEQ ID NO: 7792 - DNA, 249 bp, Homo sapiens
tttacaggcatgagccactgtgcctggcccctttatttgataatttacacatacatttttgtccaaaactcttctttatttcaagatgatgtttctgtggctatgtgtggtatgtggtataaatctcaatctatggtcacacgaggggcattttccttgttgtaagtgtagtctaaaccagtaggaaggaggtttaattgccaaaaccagcgagaactcgggcactgtggatactacagtgggcagctg

SEQ ID NO: 7793 - DNA, 2167 bp, Homo sapiens; identical to SEQ ID NO: 437

SEQ ID NO: 7794 - DNA, 419 bp, Homo sapiens
ttttttttgttttagaggcattttatttagacaactaaaaacaattagatgttcagaggcagtgtacaatgaacgagaaatcaaaccagttactttatcatgtattccctcttctttacaactgaagcaaaaaaagaaaaggcattctgctttaagatcagaaaaaatcagccaatatagttttcttctccatattaacataaacagctacaagaaccctaattgtaataatagaaattggatgttggcttgtatatattcattaaaaagataacaggccactgtactataagaggataactccacctcccttcatctgacacttgagttttcacttacaggtaacaccaagttagttagttgttccagcactggagctaattcattttcctcattatttactgctgtttctgccttaa

SEQ ID NO: 7795 - DNA, 435 bp, Homo sapiens
caacataaactccaacttcactgaggtggctgaccacgtccacgaccaaagccgcctctaaactggaactcagtggctgagccagccccagcctcagctttcttgtcagctccagggggcacagcgctccttctgtaggtgtctctgtcagcctcccctcttgtgaatcttgcaggtcgctcaccctctggacctttgggccgaggcatgccggtctcgggacggctgcgacgcaggggtggcgggcacgatctccgggggtaggtgcaggtagtctcggagatactggatgccctcgttcgtaaggtaccagtagaaatgtctccaagcaaactgttccttcacgtagcctcgagacttgagagactgcatggccttcattacatgaaggttgggcacatttttgtctgccagctccgggtgcttaggcatgtg

SEQ ID NO: 7796 - DNA, 430 bp, Homo sapiens; identical to SEQ ID NO: 544

SEQ ID NO: 7797 - DNA, 325 bp, Homo sapiens
ctttttaattgtttaactttattactgttgcaccatttatacaattacatataattycaatgcatccattgtacatttbtbbgttttttttttgttttttttttccattttccaatgrgtggtgtgttggkgtctgtsacacagaatggaagagaaactggaactgcaatgaacgsagacttttttttttttttttttcatttccactgmccaataaacagaactacaggkgcacccaaccacggacatgcattaactcgtcatgrgaaatctaggtaggctaagtctcgtgccgaattcctgcagcccgggggayccactagtt

SEQ ID NO: 7798 - DNA, 292 bp, Homo sapiens
acagattttggcttttattctggccatcacacatctacttctaagacaacacagaccggcagtaccccatcccccatgaccactgtcacaaccccaatttcctcagccccctcctcccaccccaccccttctgccaagctccccgtatggtgctctgcctacacctcaccccgggcatgcagcatgaagtgcccgtgcagcgtggggttcccggtggggcctccccaaggggtgagcggccacagagctggcaaggctgggccgagggctgggctgcacggggggcccggcg

SEQ ID NO: 7799 - DNA, 1797 bp, Homo sapiens
ccagcagggagctgggagctgggggaaacgacgccaggaaagctatcgcgccagagagggcgacgggggctcgggaagcctgacagggcttttgcgcacagctgccggctggctgctacccgcccgcgccagcccccgagaacgcgcgaccaggcacccagtccggtcaccgcagcggagagctcgccgctcgctgcagcgaggcccggagcggccccgcagggaccctccccagaccgcctgggccgcccggatgtgcactaaaatggaacagcccttctaccacgacgactcatacacagctacgggatacggccgggcccctggtggcctctctctacacgactacaaactcctgaaaccgagcctggcggtcaacctggccgacccctaccggagtctcaaagcgcctggggctcgcggacccggcccagagggcggcggtggcggcagctacttttctggtcagggctcggacaccggcgcgtctctcaagctcgcctcttcggagctggaacgcctgattgtccccaacagcaacggcgtgatcacgacgacgcctacacccccgggacagtacttttacccccgcgggggtggcagcggtggaggtgcagggggcgcagggggcggcgtcaccgaggagcaggagggcttcgccgacggctttgtcaaagccctggacgatctgcacaagatgaaccacgtgacaccccccaacgtgtccctgggcgctaccggggggcccccggctgggcccgggggcgtctacgccggcccggagccacctcccgtttacaccaacctcagcagctactccccagcctctgcgtcctcgggaggcgccggggctgccgtcgggaccgggagctcgtacccgacgaccaccatcagctacctcccacacgcgccgcccttcgccggtggccacccggcgcagctgggcttgggccgcggcgcctccaccttcaaggaggaaccgcagaccgtgccggaggcgcgcagccgggacgccacgccgccggtgtcccccatcaacatggaagaccaagagcgcatcaaagtggagcgcaagcggctgcggaaccggctggcggccaccaagtgccggaagcggaagctggagcgcatcgcgcgcctggaggacaaggtgaagacgctcaaggccgagaacgcggggctgtcgagtaccgccggcctcctccgggagcaggtggcccagctcaaacagaaggtcatgacccacgtcagcaacggctgtcagctgctgcttggggtcaagggacacgccttctgaacgtcccctgcccctttacggacaccccctcgcttggacggctgggcacacgcctcccactggggtccagggagcaggcggtgggcacccaccctgggacctaggggcgccgcaaaccacactggactccggcccccctaccctgcgcccagtccttccacctcgacgtttacaagcccccccttccacttttttttgtatgttttttttctgctggaaacagactcgattcatattgaatataatatatttgtgtatttaacagggaggggaagagggggcgatcgcggcggagctggccccgccgcctggtactcaagcccgcggggacattgggaaggggacccccgccccctgccctcccctctctgcaccgtactgtggaaaagaaacacgcacttagtctctaaagagtttattttaagacgtgtttgtgtttgtgtgtgtttgttctttttattgaatctatttaagtaaaaaaaaaattggttctttattaa

SEQ ID NO: 7800 - DNA, 267 bp, Homo sapiens
aggtatgasgctgatgccasgyaagtttttattatatttmgaaaaaaaatgtaactsgaaataaaggtaagtcatttaaaatgaatgagagtttttaaacccctataattctttaatggcagcatttgggtccactgccaagccacttttaacccaaccaagatbgytggaaagcagagcacacagttgtgcccaccavgccaggrgggcgatggmccccagggctcctcgactacgcttgctgggttctcccgtgtaatagccata

SEQ ID NO: 7801 - DNA, 231 bp, Homo sapiens
gctgtccttttaaattttaataaaatagattaatttcatattacatagagagcaagtccatccattcatccgtgataaaattttagaaatattttctataaaatgtttagtatttaattggaaatgaatccagtataaacatgactttccacagatacagcattcccatcctcactcccattcctattttgagaatttaaaatacagaaagtacaaaaatagcagatatcc

SEQ ID NO: 7802 - DNA, 263 bp, Homo sapiens; identical to SEQ ID NO: 607

SEQ ID NO: 7803 - DNA, 2862 bp, Homo sapiens
ctgcagccttgacctcctgggctgaaggctcagcctcccgagtagctgggaattttttgtactttttattcttttatgtccgtgtgtacacaaatttttgtatttttttgtagagaggcagtctcactgtgttgtccttactaactttatatacaaaattttatctgttaaagccggaatggttcttttcacgaggccctgtccctgctccagtatctgtaatgaattctcgtgttcctcccacagtgggacctgaaccgccaaaccgcacctacgagcaaacggtaggcgctccataaatacttgttgatgtgggtgccatcgtgtagatgacggagcacgaacccgaggctcagacaggggcggcgacttgtccaaagtcactccgtggaggaagcggctctgcagacctcaggcggcggctgctctaatccctgcagcctgtgttttgccctccagacggcagagggcgcgtgttcgcgccgggaaagcggaacgcgtgtgcgcgcacggccgagggggcgggacatgccggcagtctcgcgataactgcgcaggcgcggaccaaagcgatctcttctgaggatccggcaagatggtgagtgttgcgatttggcgcgtctctgccgggcctatccggctccatccaacctctgaccgtctcgcgggggccgcagttcgtccccgcggctacggcggcttgctcccgaccctgcaggcggctggatgttggggcgaggggcggacttggtgggtgtcgggacgacgcggggctgggaaggcctgtccggttcttcatgtccgggtcctcgtaacccggagccgcgagtgatccccggggacgggtcgaagcggtgtgtccctgtcgggcttctgtccccggcggcgccgcgcgtcttccgcggtgtcctcgggcccggtggccccgggagatgggtgtcgggatccgctgacgcccgatccgcgcccgcacaggcagaagtagagcagaagaagaagcggaccttccgcaagttcacctaccgcggcgtggacctcgaccagctgctggacatgtcctagtaagggcggccgcgggggtcgcgggcaggggctgggccagcggtggggcttgtccgggtgagggcggcggggcgggggtccaagcgcctctgcggcggtgggcgggcacggtctccgcgcgggtttggaactgagtgtggtcttgcgcccagaaaactgtccagagacgttgaggtttttgcttatttgcaacctgccccccgttgttcacttttccgcggcttagttggaaggtgtagcccctgtctgtagcccacgtgacttagaataaggggctgcgttagactccttagattttaagggcggtggaggtcggctgggtcctttccaggcagggtggtggtgggcatctgcttgcgcttttattttttaatttttgattattttgaggcggagtctcatcctgtcgcccaggctggagtgcaatggctccgtcccagctcactgcagcctcccactcccgggttcaagcgattctcttgcctcagcctctcgagtagctgggattagagggcccccccaccacgtccggctaatttttgtatttttagtagagacgagtttcagtgttgcccaggctggtctcaaactcctgacctcaggtgatccacctgcctcggcctcccaaagtgctgggattacaggcgtgaacaccgcgcccgaccttgatttttgattatttgtggaaacagcgtttctctgtgtcgtccaggttggtcttgaactcctgggctcaagcgaccctcccgcctcaacctcccgaagtgctgggatcacaggcgggagccactgcgccctacctgccttcccctgcgtttttagagcctttggcccgagctgtacgctgcagcaccttgtctgaggctgtggtctccgggccgcttgttctctctgaatctctgcagtcacacggtggctcttgcatgtgaggggtgagtcgcgcatatctggcgggggtgccagagggacttggcgtgttcattgtagtcactacaatggacagtgacaggtccactgcggctctgtccctggagagaaccaagccttagttctctgtccgccggagtgcgtagggtctccccaggccgggccgctcacaaaactgcctggtgcatcctccccagcgagcagctgatgcagctgtacagtgcgcgccagcggcggcggctgaaccggggcctgcggcggaagcagcactccctgctgaagcgcctgcgcaaggccaagaaggaggcgccgcccatggagaagccggaagtggtgaagacgcacctgcgggacatgatcatcctacccgagatggtgggcagcatggtgggcgtctacaacggcaagaccttcaaccaggtggagatcaaggtgtgtgcggccgtccctgccggctggggtgggctggggtcgcctgatgcaggcgggatcactgacacccagctttgctcttggtctcccgcagcccgagatgatcggccactacctgggcgagttctccatcacctacaagcccgtaaagcatggccggcccggcatcggggccacccactcctcccgcttcatccctctcaagtaatggctcagctaataaaggcgcacatgactccagtcctttgcgcacgttgttcttcctggcgtcccgagctctgggaggggcctgggcctgcttcaggttcgtggtgtgaggaggttcaggttggacgttcgggggtgtgtggtagtgttgtgtggatggtctctgtggtgtcgaagacatgacagctagtgcgggccctgccccaactcggctgcccctgctcctgtctgcag

SEQ ID NO: 7804 - DNA, 335 bp, Homo sapiens
agctttatttggcatggaacctaaaatagaagataagatcttgatattctgtacaagttgatgtaataccctgatgcgttttagaggacttggcataaaatgaaagattggcaaaggcccttgagggcttggggatgagagtatggaactgtctgcattggaccctaaactggactagaagaggcatcttcaaggttcatacgttgtccagctgtaagttcatttgagtagcagacctaacaaatatttgaggtcaaaaccctaccatgttaaaacaaacaaaaacttaccatgttaataaaagtattcatttgcttgaaaagacgaaagaccta

SEQ ID NO: 7805 - DNA, 526 bp, Homo sapiens
tatggtgccaattttaaatagttttatttaagacattgcattttccacttacaatacagtgtttataaagtgcaatgttatttccttcccctgtgcatatgttccatattcaagtattgagaatgcccagtaacttactatagcagcttaactttttaaaactgccacagaatttgctacgaatttaggtccttcaaatgttttaaatgtgtggaacaatgctacatctacacttggttggcttaatcaacctcttcaatggtgggccctgaggaagcaccaccagagggaggagctccaccaccaggaaatcccccaggcattcctcctggcatgcctcctgcactctggtacagcttggtgatgatggggttgcaaactttctccagctctttctgttgatgttcaaattcttccttctcggcagtctgattcttatcaagccagttgataatttcattacacttgtccagaatcttctgtttgtccaatcgtaaacctgccttgagtttccaacttcaacagt

SEQ ID NO: 7806 - DNA, 630 bp, Homo sapiens
gttcgggagccgcggcttatggtgcagacatggccaagtccaagaaccacaccacacacaaccagtcccgaaaatggcacagaaatggtatcaagaaaccccgatcacaaagatacgaatctcttaagggggtggaccccaagttcctgaggaacatgcgctttgccaagaagcacaacaaaaagggcctaaagaagatgcaggccaacaatgccaaggccatgagtgcacgtgccgaggctatcaaggccctcgtaaagcccaaggaggttaagcccaagatcccaaagggtgtcagccgcaagctcgatcgacttgcctacattgcccaccccaagcttgggaagcgtgctcgtgcccgtattgccaaggggctcaggctgtgcgcgccaaaggccaaggccaaggccaaggccaaggatcaaaccaaggcccaggctgcagccccagcttcagttccagctcaggctcccaaacgtacccaggcccctacaaaggcttcagagtagatatctctgccaacatgaggacagaaggactggtgcgaccccccacccccgcccctgggctaccatctgcatggggctggggtcctcctgtgctatttgtacaaataaacctgaggcagga

SEQ ID NO: 7807 - DNA, 236 bp, Homo sapiens
tttttttttttttttttttttttttgcccaccaagagggagtcctttaatagagatcggcacagacaggagacacaacagcccaggcgccctgcttgcacaggctggggccctgagccaacagatgcagtggcttcctcctcccccacctgggtgtgggcccatggggtggagacagagaggtggctttaaaaaacacagctgtactaattcttcactttcacagagaaggggaac

SEQ ID NO: 7808 - DNA, 255 bp, Homo sapiens
amaaatagcactttttatttgccactatttgargtctgaactttaaacagattcttggactggkggttcatatccatcagctcgttcaactttagcacctsccycgtccccagtggcttttccagaactactgccttcaccatgaagctccatgrgctttcccaattcaaacttgggcttcttcagcatttttacttttctaacggrgacatcatggrgaggataaatagattggcaagccttttctatgccytt

SEQ ID NO: 7809 - DNA, 369 bp, Homo sapiens
tttttgctatacatctgcatttattatgagcagcaggtgggacacttccagcaacagtaaaaaaaagtaatttacaaaagcaggtttcagtgaagccatctggttgttacccttgggtgctcacacgtagatgccaacccagagcagcaggaagaggactccaaagcccatgaagagtgaggccactaaggagatgaggagctctttatagatatcacgagtgtacttggtagaggtgacctcgtaaacgaagaaccaggcggtgaagaacatgccaatggccaaaagcaccacggtcagatgggggaagacagctgggttcactgggctggtatatctgctcatggcctcgactccattttgccccgc

SEQ ID NO: 7810 - DNA, 327 bp, Homo sapiens; identical to SEQ ID NO: 5037
  misc_feature (1)..(327): n=a,t,g or c

SEQ ID NO: 7811 - DNA, 347 bp, Homo sapiens
aaacgaaaacgaggactttattataaaaaaacgttggaccacgttgggctgggcaccaggacagtgtcctggcacgtttccaggcgagccgcgcaggctccttggagcagctcctcgggcaggaaaccctgtacgccagggattggagaggcctgcgccaccctccatgcaacgtccagacaggtggatgttcagcagcccgtccaaagggatgctccaagcgctgtggggtggggccagaagcccgcccacctgggccctggaggaggctggagtgtgagagcctctgtgacgcgcatctgccgggctactcatacagccagtgcccagcgctgtcctcccagcag

SEQ ID NO: 7812 - DNA, 350 bp, Homo sapiens
  misc_feature (1)..(350): n=a,t,g or c
ttttgtggggggggcaactaaacaaacacaaagtattctgtgtcaggtattgggctggacagggcagttgtgtgttggggtggtttttttctctatttttttgtttgtttcttgttttttaataatgtttacaatctgcctcaatcactctgtcttttataaagattccacctccagtcctctctcctcccccctactcaggcccttgaggctaattaggagatgcttgaagaactcaacaaaatcccaatccaagtcaaactttgcacatatttatatttatattcagaaaagaaacatttcagtaatttataaataaaggggcactattttttaatgaaaanaatttg

SEQ ID NO: 7813 - DNA, 343 bp, Homo sapiens
  misc_feature (1)..(343): n=a,t,g or c
gttgacaaaagaatcagaaanatatcgaaaactttactagaaatatagagaaaaaaaaataactgcctgggaggtttcctgtccctncaggatggatgaccaacagatggggcacctaggtccagtggggctgctcccgatctactgtttcttcctccaggagcaaggcatctagctcctccagccgctgctggagcagggggcccacatcagggctgggggccacattgggaggaacagtcctgccccctgcagcccggaccccacgggacggtcttcgtgatcgaggaaggctgctgtcccgaaattccacagcccgccggagcttccttgagctggtgaa

SEQ ID NO: 7814 - DNA, 224 bp, Homo sapiens
ttttaggtctgcagagcatttattccgtcccagtggggaggggcagggatccaggtggccggaggtacagggcctacgtgtaccacatgaagccgtggctggcatggagagcctcctctgtggtgcgcagccgctacagctccccgatcaaggggggcacacagcgcgtgtgtgtggaacacagactcccccaccttccagtcgggcacgtccttcatgatgat

SEQ ID NO: 7815 - DNA, 381 bp, Homo sapiens
gatggttttgcactggtttttgtgaatgtttcttacaaaaagaaaaaggaacaaagaataaatagtgaccgtgaagaaaggtggtcttgatttggggttggggatagactggggcgaggcagaagcttgacaagaggctgctgatggctggagggagctgggagaagaggcgttccaggtcaccccaaacggagcgtagagcgcgcccacaccgagctttcctcgctggacttaagggcccctgtccctcacccctctgccactgcctccttcccaactgtaaatctccttgccttagagtccccctgccctccaagctgtacgtctgtcttccagatcttacctgacctgcagccccctccctcaccctcacctgcaggc

SEQ ID NO: 7816 - DNA, 82 bp, Homo sapiens; identical to SEQ ID NO: 4980

SEQ ID NO: 7817 - DNA, 382 bp, Homo sapiens; identical to SEQ ID NO: 759

SEQ ID NO: 7818 - DNA, 364 bp, Homo sapiens; identical to SEQ ID NO: 530
  misc_feature (1)..(364): n=a,t,g or c

SEQ ID NO: 7819 - DNA, 333 bp, Homo sapiens
gcatcataaattttattcccgatgcgggacagattccttccatccccaaatgaatcacatgctgccctggaaagacctaggaaactctcctaccatctccagagaagtagtgagaaaggcaggtgctggggactgggaaggctttgaagtttcccagcctacttatcctccccttctcaagagaggatagctgttccctattactcctctcatccactcatcccttaaaaaaaacccacaaaaccatcattagtaaaaaaacaaaaccccttcaagtattgggggttaggggttctgggctgggacttggggttatgggtcaccaatgaaagt

SEQ ID NO: 7820 - DNA, 576 bp, Homo sapiens
cattttttccatttttatttgatgtttccaaatataaaaaagtcaggattcttacatcaattatctcaaatgagaccatgcaaagcaattcagtgtatacaacaatcatttttccccttcagttctgctgctttatacaacagtgtgattgacagaaaattggatggcatgtgcctggtcagaaaatgtcatctgtttacaaaataacgtcatgcagcacagtttctactttgtctgcaagtcaattcacaaaaactacttattttctgttttttatttgggaggcacatggaactgaaaaatttagctgcccaattttattcaactaccccaccaaaaaaaaaaaaaaaatcacaaatgacagtcccaacactctgcaaattttggagggttgagatagtagacactatttgtcatactcagcagagttaactatttaacagaaataaatctccctagggcctttcctctcattttgctagactggggtccaggagaatcgtgaagaacccctcatgtaaaatttggaagtggggaaactgtgtggtggcattatgcagattttggctagttgca

SEQ ID NO: 7821 - DNA, 334 bp, Homo sapiens; identical to SEQ ID NO: 3778

SEQ ID NO: 7822 - DNA, 233 bp, Homo sapiens
gagagcaaatcccatttattggaatttcactgacaacaaattgagaggaaggcttccccctcccctgaaacatgccatcctctctgccctcagggtcagcacagggataagaaccccactccgcatgtccccagaggcagcactccaggggggtgggggggaggggaggggtgctctacgccaggctggggagctgggacaggagggaagacgtgcaccctcacctcttggct

SEQ ID NO: 7823 - DNA, 464 bp, Homo sapiens
agaaggaagggctttattcagctgggagcatcggcaagctacagccttaaaatctgagctcctcaagtgcacaatttctgtcccttttaagggctcacaacactaaagatttcacatgaaagggtcgtgattgattgagcaatctaggggatatgtgacaggggtttcatgcactggtacagaacacaacagggagtttcacaatttttttatacaatgcttggaatctacggataacatcaggttctaagtcgtaagttgatttttaactactaggtttaggccaggcaggcccagggctggtttcaggcctggtgccggggctgcctgtctttgatttcacttccttgtttttttcttaaaacaggtactgagtataaaacaatataaaacaatatgagaaggtctctctcttccctcaagagtgtatgactttgctgcccaggatgatcttgaactcctgg

SEQ ID NO: 7824 - DNA, 2767 bp, Homo sapiens
gggcgggcgcattgcagactgcggagtcagacggtgctatgtacgccctcttcctcctggccagcctcctgggcgcggctctagccggcccggtccttggactgaaagaatgcaccaggggctcggcagtgtggtgccagaatgtgaagacggcgtccgactgcggggcagtgaagcactgcctgcagaccgtttggaacaagccaacagtgaaatcccttccctgcgacatatgcaaagacgttgtcaccgcagctggtgatatgctgaaggacaatgccactgaggaggagatccttgtttacttggagaagacctgtgactggcttccgaaaccgaacatgtctgcttcatgcaaggagatagtggactcctacctccctgtcatcctggacatcattaaaggagaaatgagccgtcctggggaggtgtgctctgctctcaacctctgcgagtctctccagaagcacctagcagagctgaatcaccagaagcagctggagtccaataagatcccagagctggacatgactgaggtggtggcccccttcatggccaacatccctctcctcctctaccctcaggacggcccccgcagcaagccccagccaaaggataatggggacgtttgccaggactgcattcagatggtgactgacatccagactgctgtacggaccaactccacctttgtccaggccttggtggaacatgtcaaggaggagtgtgaccgcctgggccctggcatggccgacatatgcaagaactatatcagccagtattctgaaattgctatccagatgatgatgcacatgcaacccaaggagatctgtgcgctggttgggttctgtgatgaggtgaaagagatgcccatgcagactctggtccccgccaaagtggcctccaagaatgtcatccctgccctggaactggtggagcccattaagaagcacgaggtcccagcaaagtctgatgtttactgtgaggtgtgtgaattcctggtgaaggaggtgaccaagctgattgacaacaacaagactgagaaagaaatactcgacgcttttgacaaaatgtgctcgaagctgccgaagtccctgtcggaagagtgccaggaggtggtggacacgtacggcagctccatcctgtccatcctgctggaggaggtcagccctgagctggtgtgcagcatgctgcacctctgctctggcacgcggctgcctgcactgaccgttcacgtgactcagccaaaggacggtggcttctgcgaagtgtgcaagaagctggtgggttatttggatcgcaacctggagaaaaacagcaccaagcaggagatcctggctgctcttgagaaaggctgcagcttcctgccagacccttaccagaagcagtgtgatcagtttgtggcagagtacgagcccgtgctgatcgagatcctggtggaggtgatggatccttccttcgtgtgcttgaaaattggagcctgcccctcggcccataagcccttgttgggaactgagaagtgtatatggggcccaagctactggtgccagaacacagagacagcagcccagtgcaatgctgtcgagcattgcaaacgccatgtgtggaactaggaggaggaatattccatcttggcagaaaccacagcattggtttttttctacttgtgtgtctgggggaatgaacgcacagatctgtttgactttgttataaaaatagggctcccccacctcccccatttctgtgtcctttattgtagcattgctgtctgcaagggagcccctagcccctagcccctggcagacatagctgcttcagtgccccttttctctctgctagatggatgttgatgcactggaggtcttttagcctgcccttgcatggcgcctgctggaggaggagagagctctgctggcatgagccacagtttcttgactggaggccatcaaccctcttggttgaggccttgttctgagccctgacatgtgcttgggcactggtgggcctgggcttctgaggtggcctcctgccctgatcagggaccctccccgctttcctgggcctctcagttgaacaaagcagcaaaacaaaggcagttttatatgaaagattagaagcctggaataatcaggctttttaaatgatgtaattcccactgtaatagcatagggattttggaagcagctgctggtggcttgggacatcagtggggccaagggttctctgtccctggttcaactgtgatttggctttcccgtgtctttcctggtgatgccttgtttggggttctgtgggtttgggtgggaagagggccatctgcctgaatgtaacctgctagctctccgaagccctgcgggcctggcttgtgtgagcgtgtggacagtggtggccgcgctgtgcctgctcgtgttgcctacatgtccctggctgttgaggcgctgcttcagcctgcacccctcccttgtctcatagatgctccttttgaccttttcaaataaatatggatggcgagctcctaggcctctggcttcctggtagagggcggcatgccgaagggtctgtctgggtgtggattggatgctgggggtgtgggggttggaagctgtctgtggcccacttgggcacccacgcttctgtccacttctggttgccaggagacagcaagcaaagccagcaggacatgaagttgctattaaatggacttcgtgatttttgttttgcactaaagtttctgtgatttaacaataaaattctgttagcccccccg

SEQ ID NO: 7825 - DNA, 1517 bp, Homo sapiens; identical to SEQ ID NO: 655

SEQ ID NO: 7826 - DNA, 317 bp, Homo sapiens; identical to SEQ ID NO: 681
  misc_feature (1)..(317): n=a,t,g or c

SEQ ID NO: 7827 - DNA, 1293 bp, Homo sapiens
cacgtcagccggggctagaaaaggcggcggggctgggcccagcgaggtgacagcctcgcttggacgcagagcccggcccgacgccgccatgacggccgcgctcttcagcctggacggcccggccggcggcgcgccctggcctgcggagcctgcgcccttctacgaaccgggccgggcgggcaagccgggccgcggggccgagccaggggccctaggcgagccaggcgccgccgcccccgccatgtacgacgacgagagcgccatcgacttcagcgcctacatcgactccatggccgccgtgcccaccctggagctgtgccacgacgagctcttcgccgacctcttcaacagcaatcacaaggcgggcggcgcggggcccctggagcttcttcccggcggccccgcgcgccccttgggcccgggccctgccgctccccgcctgctcaagcgcgagcccgactggggcgacggcgacgcgcccggctcgctgttgcccgcgcaggtgggcccgtgcgcacagaccgtggtgagcttggcggccgcagggcagcccaccccgcccacgtcgccggagccgccgcgcagcagccccaggcagacccccgcgcccggccccgcccgggagaagagcgccggcaagaggggcccggaccgcggcagccccgagtaccggcagcggcgcgagcgcaacaacatcgccgtgcgcaagagccgcgacaaggccaagcggcgcaaccaggagatgcagcagaagttggtggagctgtcggctgagaacgagaagctgcaccagcgcgtggagcagctcacgcgggacctggccggcctccggcagttcttcaagcagctgcccagcccgcccttcctgccggccgccgggacagcagactgccggtaacgcgcggccggggcgggagagactcagcaacgacccatacctcagacccgacggcccggagcggacgccctgctgccgacgccagagccgccgcgtgcccgctgcagtttcttggacatagaccaaagaagctacagcctggacttaccaccactaaactgcgagagaagctaaacgtgtttattttcccttaaattatttttgtaatggtagctttttctacatcttactcctgttgatgcagctaaggtacatttgtaaaaagaaaaaaaaccagacttttcagacaaaccctttgtattgtagataagaggaaaagactgagcatgctcacttttttatattaatttttaggacagtatttgtaagaataaagcagcatttgaaatgcccct

SEQ ID NO: 7828 - DNA, 66 bp, Homo sapiens
tttttggcgagaaccgggtagtgtttattgccaggaggacacccgcacagcctccggaccccagag

SEQ ID NO: 7829 - DNA, 1594 bp, Homo sapiens
gcccgccggtccacgccgcgcaccgctccgagggccagcgccacccgctccgcagccggcaccatgcgcgagatcgtgcacatccaggcgggccagtgcggcaaccagatcggcgccaagttttgggaggtcatcagcgatgagcatgggatcgaccccacaggcagttaccatggagacagtgacttgcagctggagagaatcaacgtgtactacaatgaggctgctggtaacaaatatgtacctcgggccatcctggtggatctggagcctggcaccatggactctgtcaggtctggacccttcggccagatcttcagaccagacaacttcgtgttcggccagagtggagccgggaataactgggccaagggccactacacagagggagccgagctggtcgactcggtcctggatgtggtgaggaaggagtcagagagctgtgactgtctccagggcttccagctgacccactctctggggggcggcacggggtccgggatgggcaccctgctcatcagcaagatccgggaagagtacccagaccgcatcatgaacaccttcagcgtcatgccctcacccaaggtgtcagacacggtggtggagccctacaacgccaccctctcggtccaccagctggtggaaaacacagatgaaacctactccattgataacgaggccctgtatgacatctgcttccgcaccctgaagctgaccacccccacctacggggacctcaaccacctggtgtcggccaccatgagcggggtcaccacctgcctgcgcttcccgggccagctgaacgcagacctgcgcaagctggcggtgaacatggtgcccttccctcgcctgcacttcttcatgcccggcttcgcgcccctgaccagccggggcagccagcagtaccgggcgctcacggtgcccgagctcacccagcagatgttcgactccaagaacatgatggccgcctgcgacccgcgccacggccgctacctgacggtggctgccatcttccggggccgcatgtccatgaaggaggtggacgagcagatgctcaacgtgcagaacaagaacagcagctacttcgtggagtggatccccaacaacgtgaagacggccgtgtgcgacatcccgccccgcggcctgaagatgtcggccaccttcatcggcaacagcacggccatccaggagctgttcaagcgcatctccgagcagttcacggccatgttccggcgcaaggccttcctgcactggtacacgggcgagggcatggacgagatggagttcaccgaggccgagagcaacatgaacgacctggtgtccgagtaccagcagtaccaggacgccacggccgacgaacaaggggagttcgaggaggaggagggcgaggacgaggcttaaaaacttctcagatcaatcgtgcatccttagtgaacttctgttgtcctcaagcatggtctttctacttgtaaactatggtgctcagttttgcctctgttagaaattcacactgttgatgtaatgatgtggaactcctctaaaaattacagtattgtctgtgaaggtatctatactaataaaaaagcatgtgtag

SEQ ID NO: 7830 - DNA, 584 bp, Homo sapiens
  misc_feature (1)..(584): n=a,t,g or c
gctgctttggacagacactggaaggcaccccagacccctggtggtggtgtaatccgataactttattttaattgaaaatggaggcataacatgtcctagaaaaataaagatttaggatacaaaggagacacagcggcagggctgcccccagggatgagggaatctttggtctgggccggataatgaggacaagggcttgagtcgaggggagctggtgaaggaagacccccgtctccccacagctgccccaccccccgcccctggcaggaaatgccacactggggagggtctccagtctcaggggcgcggggtgcctgtcctccaccttcggattccaggcagttgtgacaacaccagctatcggcagagtattaatagtgtttcagggagtgacagggagagggctctgggggctggaagttccggccctggggcagggtgttccgcttacagtagtaccagtggagggggcaggcctgaagttcaggaccctgagttccccacgtatatggcagggacagattgggaaggcgtaacagaaagcctccatccaangggatgagacttgacagagttggccggga

SEQ ID NO: 7831 - DNA, 591 bp, Homo sapiens
  misc_feature (1)..(591): n=a,t,g or c
cattctgaaagatgtagagaatacagggactagaagcacttatattctcccaacaaatttgcatacatgacaaaaaacaggcaaaaggcagagagacccaaagacgggatttattgggggcccagtcatcacctggaagtcagaaggcgttgaagtatcgcggggatcttcatgatgagcaggaacagggctcatcatggcaggactgtgatagagtcagaaactgactctgtgacctggcgcacccactgcaggtacggaaagttcccctgttccacaggcaatgcaattacctcggccacttcgtaagggtgcacagaacgaacaaaatctgtcaaagctgggaccaaggaactttgggttttaatcatcatcagcacctcactgtctttcctcgatcttccctttccactcatagatggatgtaatctgagggatgaggttgacgcaggctgctaggcgcttctccaccacggccctggcgatctccttgggcgaccttctcgttggggcaagtaacaaaggctgcagagaccgagcccggaacgtagccagagccggatccgaggccggcnaggctgggtcggaggg

SEQ ID NO: 7832 - DNA, 305 bp, Homo sapiens; identical to SEQ ID NO: 5131
  misc_feature (1)..(305): n=a,t,g or c

SEQ ID NO: 7833 - DNA, 106 bp, Homo sapiens; identical to SEQ ID NO: 3464

SEQ ID NO: 7834 - DNA, 281 bp, Homo sapiens; identical to SEQ ID NO: 2819

SEQ ID NO: 7835 - DNA, 347 bp, Homo sapiens
tgagagacaataggaatttttaatgcatggacaggcctgcagggactctgggcagacccacaggtagcaggaagaggcagggtcccacaaactcaataatgtccagcaaaaaagagagagaagtccttaaagacccatgcttcctcactgcaaccatcctcagagcttccttcctggtgctgaagaggtcaaaactgtctcctctaggggtcaggtcaaaactgtccctccataggtctcctccaggggtccatggcaggaagaaagcagagtgtggcaggaagaaggaagaagagcaaaggccgcttggtctccacctgaaaacttctgccttgggattgacagcc

SEQ ID NO: 7836 - DNA, 321 bp, Homo sapiens
ggcctcacagctttttattgaagtacaacataaatactgaaaagtacacatataaacatgcctgcagtttcatgaagttttacaaacccaatccacccacataaccagcatcaagctcaagaaatagaacttgtccatccccctagaagtccccagaagccccctccaaatcactgcccctcccccaagggcagccacgctcccaaccttttaattatattttgaaagtaaagctggcaggatcttttgctggatcgaatgggggcgaggggagctggtgaaagacaggagtcaaagagagcccccaggtttggggtgaag

SEQ ID NO: 7837 - DNA, 243 bp, Homo sapiens
gtacagatcctttttattcagatttatataggcaatttaccaacacagaaaaccagtctagcagctccaaagtaactgtaaaaacggtggtgctgacggtggtgtgccccacacagggcaggtgacctcagacgtggagcagcatctcccgtgggatactatttcagacgtgcactagtgagtgtatactgagaagggattataaaccttccctggcacaacagatacaaaaagagatagaac

SEQ ID NO: 7838 - DNA, 871 bp, Homo sapiens; identical to SEQ ID NO: 3085

SEQ ID NO: 7839 - DNA, 284 bp, Homo sapiens
  misc_feature (1)..(284): n=a,t,g or c
agaatttatttttactttattaacaatgtggcttacaatttttttgaagtaaaaagggtttttttcatttagaataaaaattaaaatataactctgntatagattttcatttatttacatgaaaacatatatacagaatacaatcttacagcaaaccaaaagcatgcccttngtcctgcaaatttcaaaagtaatgacaccaattttccccttttacgcaccaaaaacatacacaagataggaatccaatttcaatacaaactattcaaactagaatgcaaaac

SEQ ID NO: 7840 - DNA, 8670 bp, Homo sapiens; identical to SEQ ID NO: 5406

SEQ ID NO: 7841 - DNA, 379 bp, Homo sapiens
  misc_feature (1)..(379): n=a,t,g or c
ggcgagtantaagtttattaggacttacacacagggcactcagcaagacagctcgagagatccggcctcccccaatgtctaaactgcttttcagttaattttctggctctttgtctactatatatgagcaacgagacttttacttggttggttctcagatactctccaggatgtttggattctcagagacacctggtcctcagctgggcaccatggaaatggctcagttacccggccntcagggttcaagcagggggacatgnaccctttaaataanctaaaggggacctggtcacactacaacccaccaccancaatcattcaaagnaaggccnacttgggttgaactcagattacaccccctgggaagggacaaagg

SEQ ID NO: 7842 - DNA, 346 bp, Homo sapiens
tcagagaaaactcaaactttattgagagaattttcaaattttcagtcacattttcaatgtgacatcagccatgtgtgtagcttcagcttgtcttctttttaacttatggctgcccatctcctgcttctttagtcttagcatgcttaggattaggtggagtcttctcttttacatcagagccatctccacgctcactccgagtcttttccagatccatttcctggcaatcaccttctactttacgttcttcgatcggaggtgttccttctctctcttgtccaggttcaatatcctgattgtcagttggtggttcctcttgctgagattcaccgggagccacgaatgc

SEQ ID NO: 7843 - DNA, 388 bp, Homo sapiens
ttttttttttgcttaactttttattcatcatggcacaagatagaaccttaagaaacaccactgggaatttcatcaccaacatgaaaattaagagtagcatgttttataaaagaaaaaagaatctttttttataatacactttcccttcagaagtgaaaaaaaattgcataaaatactgaagcgtatcgccatctgctggtcaaaaatagttatgcacttgaaaaacttcaaactactaaagtacggtagaacattttacaatacacataaaattacgaaagaaaacatttcctcagcctttggtacaatgtaagtacaaagctgtaggccttttaccaaatgtgatttagtttttaaggaattgcatgtaatttggcaaatactgatt

SEQ ID NO: 7844 - DNA, 402 bp, Homo sapiens
tttttttttttttgaaatttgataaatgtttattgacttgctgattcaaaaaaacagtgtagctgagaagtctgatcagctcagaaaagagtggaatttggcaacaaatatgttatccaacaaaatctgagtaatttatcaccttttaacatcttcaacatatttataatataaatattttttaaaaaaccgattattaaactaatactcccctggaagaacaagaggactaattttcggtgacgacagacttgtgctgatccatcatctggaactcctaaagacctgaatggctgactgggattagtgactactatctggttttactggttttactctactaagcccatgattttgtggttttaaccaattaagaaaattatccccaagcacaataaaaat

SEQ ID NO: 7845 - DNA, 318 bp, Homo sapiens
ttgcacatatactttaatacttaggcttgggtaaaatcattttaaataacatattaaaatatgtttggggggacaacccagcaattgcacagcccactagaaaattttaacatctaagtaatataactgttttagggtctgaaagttctccttcagttgttccacagcctctttatcaactaggcaaatatatttaagcttttaaatttcataatgttggtattttttaaaaggcacgggaggttcacttaatattaaatatataacattcactttcataaccaaaacctttttggcaagtgactttcacatagatta

SEQ ID NO: 7846 - DNA, 356 bp, Homo sapiens; identical to SEQ ID NO: 1765
  misc_feature (1)..(356): n=a,t,g or c

SEQ ID NO: 7847 - DNA, 197 bp, Homo sapiens; identical to SEQ ID NO: 206

SEQ ID NO: 7848 - DNA, 448 bp, Homo sapiens
tgattatggttcctttatttacaagttttttgaacaccatccctgtatgaagcatacattcaaatattcttagcagtgagcgagtttaaccacggaacactgtaaacagatagggcctttaaatattttcatcatctcttttcccctctacattgcatcttttaaaattcgctttggttccttcagggaaatatatatatatataatataatatttatcttttaaaataattccacctcactctcaggctcttggaaggtcaccagaagcttccaagctcagttcaagagccaatgagggctgagtgtggtgctggaacccggtgttttgggggactcaaggccctcatagccaaagctggggacctgctggccaggcccactgctctgcagcccagacactgagcaaatccaagtttcattacgtgtggtggagagtttgccaaact

SEQ ID NO: 7849 - DNA, 641 bp, Homo sapiens
ttttttttttgatacaactagcaaatgttcattggtttacaacaaacccaaaatactcatcaaatatgggctgttggatttagaaaaataagattcttgagcgattccagctgcatttgtttatacagaacacatttactcaggaccctgcagtgtcagcttcgttctttgggtatgcagccttctatctggatctctgcaggccagccagaatatctgttgttcttagcatcagagtggttgatcttttctctctgaatttcggaagggagttccaagccttttgctgcaataaatacccagctagacctgaatttcatgttcctgatttctttacttccaagtgcttctatggcattcttggcatcgttattcagtcttgtgcttccgtcgtcataggtcaccatgaagagcagggattttggagcagcactctgaataaactttgtcatcggtccagagttatcgccttcatacatatcaaaacatcgtgttgctgtcacattcccagttacatagttgacaatggcaatgtttattcctctggcaacatttcccagctgttctcccataagtaggttatcctcaaagcagattttggcgtacttgcttctgccacctccgctgagtaacctgtaggc

SEQ ID NO: 7850 - DNA, 553 bp, Homo sapiens
  misc_feature (1)..(553): n=a,t,g or c
ttttttttttttttttttttttttgtcttcttaaattttatttgtgaattcagcaaaataatttctataaaacaaaacagccaaacatttaaatagtataggataggctgtatctatttgcaggtatatttggtttttaaacaggttccaaaatattacacacattcaaaatttaccaattctcttttaaatatagtattaactcacaggtttcttggaatcttaaaacaaatgttttttctaaaatggtaccttagaattacattaaataagcaggagcttagatcttaattaaatcttgtatctaacaacaagagttttagaataatgaaaaaaaactacaacaattctttctttcaaataaaagtgtgactatgaattcagtcagacatcttggtgcaatggtacttcaaagtactatggattcttatgatgtacacttcaccgggattcgngagagccaaggttttagaaacctcccctaaaaaatttctctgggaaaaaaaaatcgcaggcccaccaattcaatcctttatgcttcacacaatctgga

SEQ ID NO: 7851 - DNA, 390 bp, Homo sapiens
ttttttttacaaagtaaactatgatttttattgtgaaattttcatagatggaaaattgaatattctgtccatttcattttacaattatcttaccacttatttttgtaccatgtatttcaattgcctgtttagtgaaaaataaaaattaaaaaaacctattcatttttggcttgtgtttagcttaaattttatcattaaattaaggagcccacaacaaaatgtgttgccagcagccatatcccaagcccctgcgtgaagaatgttttggctgctatttcaacctaaggaaacaacgtttgacctcagtcaccttaaaatgccagtgtgggcagaagattttttattcctcacaattaaaaaccaaacaaaaccccctaggatcttgaaggt

SEQ ID NO: 7852 - DNA, 587 bp, Homo sapiens
  misc_feature (1)..(587): n=a,t,g or c
ttcagaatcagatatgtttaatatctgcatataacttaatatgcatttcttccattacaatttttaagtataatccaaggctttaaaaggtatcttttttttacagtaatttaaaattatagaagatgcctttcctataattgaagttattgatcaattgaaggtataaccagactgaaatatacagcaacttcttgaagaatggcaaaaataaagtgaaagttctaaattcttctctgaatttttcagctattgctaatggaaggtgctgccaatataataggcaacacaggttcgtctaacacaggtcggtctaacactggtccnngtaatcaatcatcatatcttatttctttcctttttcttttttgtttttttgagacggagccggcntctggtcgcccagggctgggagtgcagtgggcgtggatctcgggctcactggcaagctctgcctccnggggnccacaccattntcctgcctcaggcctcccgggggggctggggnctacaggggggcccgncaccatggntcggntaaattttttttggatttttaggaggggcaggggtttcaccgtgttagg

SEQ ID NO: 7853 - DNA, 362 bp, Homo sapiens; identical to SEQ ID NO: 1841

SEQ ID NO: 7854 - DNA, 386 bp, Homo sapiens
ttttttttttttttccagcaacactgcacaagttttaatgagttcactgatggacgggcagacatagagtctctggggccttgtttaaagatgtactggaaaaccagtcctggaacttctgtcattggagaaaggtggaggagatcagctctgatatgctgctaactctcctggccaaatccattagaggaaaaaaaatgcttcaagacagggccaggaatgggggtcaggacagaatctagggagtcatcagagttttggcttcttgggctctagtttgatcatgtcccctgaatgtgagaaatgtgcttatctgctgggaccggcatatcctctgtctttacaggaacatagtagtagcccatgatggagaagattcagcagat

SEQ ID NO: 7855 - DNA, 399 bp, Homo sapiens; identical to SEQ ID NO: 6159
  misc_feature (1)..(399): n=a,t,g or c

SEQ ID NO: 7856 - DNA, 297 bp, Homo sapiens
tttttttttttttttttacaagccgaagcaccggatgtaatttaatagggtggggaagatactcaagagcgggcatgggacggggcgcagagtccgggttaagggccttacgtagccaaaaggggggatccaggaccctcgggcccccccagccgcatctgcaggttgatgcggtaactcgaagactacagagtgcctggcctgtgcgggagagagattactgtcttcatccagccaggcacggtactgctcaagggggactccttccataggttcctcttcattatccacaaccat

SEQ ID NO: 7857 - DNA, 361 bp, Homo sapiens; identical to SEQ ID NO: 4730
  misc_feature (1)..(361): n=a,t,g or c

SEQ ID NO: 7858 - DNA, 452 bp, Homo sapiens; identical to SEQ ID NO: 339

SEQ ID NO: 7859 - DNA, 476 bp, Homo sapiens; identical to SEQ ID NO: 3233
  misc_feature (1)..(476): n=a,t,g or c

SEQ ID NO: 7860 - DNA, 235 bp, Homo sapiens
  misc_feature (1)..(235): n=a,t,g or c
gtgctgaccatttattgggacttgactgaccagggcttgtaagaatggacacaaaacttcaagtctttcgtaatgaaaggattgattcaaaataaatattctaaaaattatgtcaaacactaatgaataagtgacatttacaaatagtttataagngaatcatttgggtgaacaattttcatttcacaaattaaatagctcatatccanaaaagacacctctccttaagcaggga

SEQ ID NO: 7861 - DNA, 317 bp, Homo sapiens
atttatttatttttagcaagaatgtacaattctttttgcaattttttgctaacaaaagacaaaaagaaatagtgctcccttcaatttagtagcaataaaatcatctatcttcatctctctcagagggcttagggagagtgaaaggaattagaggaacataaaccatgggtccttcaggtaaaataagtcatttcatagtgatggaggcaacagcaggctacgctcttgtctgcctgtacgctcagcatcagcatgccctgcccctcctcctcccacataaggtgcaccaaagccttcttttcttctacaacagagtc

SEQ ID NO: 7862 - DNA, 3833 bp, Homo sapiens; identical to SEQ ID NO: 2457

SEQ ID NO: 7863 - DNA, 493 bp, Homo sapiens
gataaaggggttgagcatggaggtgaccaccgtgtacatcaaagcagccaaagaccctttctgggggaagatgacacatctgaactgaggtaccctccaacacctcttccataaaatcagcaaacaactgacaggtgagacccacaggtggagaaggctttatacttcccacctgatgatgaaaccctcagaatggaggaaacaattttatagtaagagaaaagggtccccgagatgggaagaaaaccaaatatggcagtagggaaatacatgattatgttattgatgaaggtgtcacaacggcaagatgggggagttgagaaaggtcacagaagaaattaggaatgtccacctccttgaagcaggtcattagtaaggcaatcaagttgtacagctgggagtctaaaagactgagaaaaaaaaaagaccagcaaactaggaagcccacagaacacaggttcatgatggctgaatgatatagagggtgacagat

SEQ ID NO: 7864 - DNA, 813 bp, Homo sapiens; identical to SEQ ID NO: 6460

SEQ ID NO: 7865 - DNA, 354 bp, Homo sapiens
aaagcttcattccacagcttttattctataagaacataaacatcgtctttttccacgcacagcagcaatacaatattaatttattctgatttaagattagaagtaaatagagctagaactaacatttataataacgatagaatgcatttgcttaaaacaagattggcaattcttcataataatagacatttatacagatttgtatttatagtttttttctttttctgcatctacaggtttgacccttttatgcatgtaacttcacagtataaaggaaatccaaacaatgtctcccttctctagtttattccgcttaccccagtcctcctaggcttctgtgaatttcagaaagca

SEQ ID NO: 7866 - DNA, 251 bp, Homo sapiens; identical to SEQ ID NO: 2710

SEQ ID NO: 7867 - DNA, 410 bp, Homo sapiens
  misc_feature (1)..(410): n=a,t,g or c
attatttagntgaataatcatttattgaaaacctactatgagcaaggactgtgcaaagccttggggatacagagataatgaagacaccgttctgctctcaaggagctcacattctaaatgggacagacaagttttcaacaattataatacagtacaataaatgtgagaatatacgtattcatggaatactgcgggatcataaaggacagacacctaactcagcttagaagaactttaaagaaagctgagtataaaagaatgaagaggcattagtagagtggatgagcagggtgggtnacagtgaagggcattccacgcacagccaaaccagcacgtgcnaaagggtncagaggtttgcggagaccctggggtaccatctgggggaatgggtnagttgatcccncttatgg

SEQ ID NO: 7868 - DNA, 344 bp, Homo sapiens
gacaagagaaatttattactaaaaataaagcagctgaaggttttcccagggaaaacatcaccacaggaccttccatgatgaaatacgttagtatcttctttacttctgaattgctgccttctttcatatacccaaaattttagtttaagttaaattaatcacgacaaaaacgatgtggcatctgatcccttcttgttcaatctgaagactgaattgggctaccctgtgatggagacttcaagtgctgcaggtgagtatctaccaagggttcatgtgtcaggtacatgggctggtaagaagacacaaaggctgcaggctgaagctctgggaggtccaaggatcct

SEQ ID NO: 7869 - DNA, 334 bp, Homo sapiens
ttatttttttgaaaataaccaaatatgaaaatgtgttttatttctcagtacaaagccagatactgtaaggctatgaaaaactgactagccagaggccagaaaggacaaaaagaagactatctctggcctggtgccctgtgatctggcgtggtgtcacaggaggtctggggacagcagcaaagacctggaccggtggaggtggatgagggaagcgatctgccagcccttccagcctcccgcggctggggcctgaggatcctgcctgcctttgggggccactggttgcctggcctggctggttccaggaatgaactgggagaggacaggaggtgca

SEQ ID NO: 7870 - DNA, 346 bp, Homo sapiens
ttttgtttataattttttaattaaaaatttttaattgacacacgataattatacatatttatggggtacatagtgacattgcaatacacaaaatatacagtgatcagattagggtaattagtatatccatcatcttaagcatttatcatttctttctgttgagaacattcaatatcctccttctagctatttagaatatatattattgttaactgtagtcatcctacagagctatagaacactacaacttaatcttcctatctagctgtaattttgtatcttttaacaaatttcttcctatcccccattaccttttaaattaaatttattttaataattaggtaac

SEQ ID NO: 7871 - DNA, 439 bp, Homo sapiens
  misc_feature (1)..(439): n=a,t,g or c
caatctnaaaaaaatattttcattatgtttattataaaaatataaatgtttccactacaaatcattttacattagtaagaggccatctacattgtacaacataaactgagtaatattttgaaaagacaagtttaaagtaaacacatattgccaatcatatcacatttatacatggcttgattgatatttagcacagcataaactgagtgagttaccagaaataaataatatatgtaaatcaaatttaagatacaaaacagntcatatgggtacataacatcatgtagggagttgtggcctttatgtttactgaaagtcaatgcagttccctgtaccaaagggatggccgtaggcattctaggtaccctctnctccctgggttagggaatccgtacacttatggtttaccatatggtccgggggtaggganttgtggtaa

SEQ ID NO: 7872 - DNA, 457 bp, Homo sapiens; identical to SEQ ID NO: 6415

SEQ ID NO: 7873 - DNA, 547 bp, Homo sapiens
  misc_feature (1)..(547): n=a,t,g or c
ttacatattgtgtatatgtttttattttcaaatgataaactctagacatatattttgcaaaatgagcttgggtttaaaaagtgctttgtgccaaaaatatcatacctaatttttatagtgctttactatcagaatttatattgtttattatatcttttaaaagcagtaagcagttttcatctgacagcgtagataaaagaggagtataggaatttgaatgctagagcatctcccaggtgagccttattgcagatctttttgatatagtcacccataagcatggtgagctcctgctctcataaggtcagccaaagccccttaagaaggtacacagcacatctgcagtcattcaggaggtcctgtgaagtgtggtgatgcatctaacaccttttgctgctcactggagaacccagctttgaacttacaagattacactaaccatttttaaagtgcnccaaaatattantattagtcctaactaaaattacntattttataatgcccctgcnactcctnaaccatccctttgggttacncattttggtat

SEQ ID NO: 7874 - DNA, 403 bp, Homo sapiens
ttttctttttttctttttttcctttttttacttacattaaatacatcggtaaatcagcagtcgcattctgttaccacgattgttatgttcggagaggaagaaaggcaaatgctttctcagaagcaaaacaaaaacaaaaaaccacaacacccccccttaaaaaaactgaccagaagaaaaaaatgagctgggaaataaacaaaagaaaactaagatccccaagcccaacagagctcaaaggaaggcagaagaggtggtaggaagtagagggaaggcagccgatacgccagaagctaaggccaaatcctgttcctatgggggttgcgggagggagaagcctggggaagtggtttcccaggcccaagataatgatacatcttcaatcctgctccaagggggaaag

SEQ ID NO: 7875 - DNA, 417 bp, Homo sapiens
ttttcctttgaatggtaactaggatctttattttcatcttgtgaggactcttttgcctaagctggttcccaaatcatggagggaaatctggacctggcaccgggaagggaacaaccttcccaaccttcattgctaggttggtccccagcgcctgggagggatgggtcagcccactgagttattgatgatttccttcctaatttcagtttccactatctctgggttgcagctggacttgtgggagagcacagtgcaagagacaggaataagcagggtaaggcagttcggaggagggtccagtacgccaacagcaagaactcttgggcagtggtgggcccagggcagcccctcactccacgttacggtacttggtgaagaggttgtacaacactcgtagtgtagattcaggtcacagtt

SEQ ID NO: 7876 - DNA, 437 bp, Homo sapiens
  misc_feature (1)..(437): n=a,t,g or c
ccctcaggttcntntttcactgtcttttatttgacagctagcgcagtctttggggaaatttgtgggtgatttgagtagtaacagcaaggacatcactgtaattatgatagtgccttatatttncctagcacctctcccaaggacttatgaagacttttagattcttcatcccttcacacaacattgcttcaaggtagggccaaggcagaaattatcatcactgttttacaaggaaagacactcctgtgcggtctcaaagcaaatgcttttaagagctaaaaattcatttcctagttctgttcaccaaatgatgccttctttaaacataaatacaaatngtaatgttaggcagggtgctatttacaggggggaaacaaaggggantttttacaataggcggccaacactgcagctggccaaaaatccccaggncagga

SEQ ID NO: 7877 - DNA, 305 bp, Homo sapiens
ttgttttttgtaatttcagttagtttattaagatgatccaaacagatttagcttaagatatgaggacaggacataaaacaagatttggctgagctagataaagaaaaccaaaagagtgacaagattttcaattggtgacaatttaaagtcatttattaactaatataaaaataaatctacgatagaaccatgacttaaactgagccagtatgtggtacatgtgtcacccaaagtcagcaaggaaccattcagaacttacaccctcctggactggctcacacggcctgtctttgatctggaacctc

SEQ ID NO: 7878 - DNA, 193 bp, Homo sapiens; identical to SEQ ID NO: 1350

SEQ ID NO: 7879 - DNA, 276 bp, Homo sapiens
gaaatgttttcccaccttgtgtctctagcttggattattcttggacacatgtaattaattggaggggcactcctaagtaggcacaattcccatttaatgtggaataaaaggcataaaatgctgttaggaagaagggtggtggtttctttgatattgtgaaatgcaaagaaggacagcagcacatttggaatgggaaccaaaagagagctgtctggcaatgcaccaggacagccaacatcttggtaagttatatataaacttgtctatgacaaagga

SEQ ID NO: 7880 - DNA, 356 bp, Homo sapiens
  misc_feature (1)..(356): n=a,t,g or c
agtggttcgaagcaacacaaatttattaccctacagtatgtaaattagtcccacagtgctggttccttccagaggctgagggacagaatgcgttttcttgcctttnccagcttttccagaagcggtccccaacctttttggcaccagagaccggtttcgcggaacacaatttttccatggattggggtcggggagggatggtttcaggacgattcaagtgcattgcatttattgtgcactttatttctactattattacattgtaacatataattaaataattctacaactcaccatcacagagactcagtgggagccctgagcttgttttcctgcaactagacagccccatctgg

SEQ ID NO: 7881 - DNA, 262 bp, Homo sapiens
gcgccgccagactgagcagaatgagctacatgctacacatacacacacgtggatgcatatgtacataccatggcagtgtatgccgtgaaggggtgtctcgtaccatgcagacatgaaatagcaaacagggctgaggtgttggcaaaaagacagtgtgcaggacctgggagggagcaggggagccaggaaaatttggactagaatatacagctgagatggagacttcagggggtgcccagttcaagccaatggcagaagacgc

SEQ ID NO: 7882 - DNA, 364 bp, Homo sapiens; identical to SEQ ID NO: 2917
  misc_feature (1)..(364): n=a,t,g or c

SEQ ID NO: 7883 - DNA, 229 bp, Homo sapiens
ctgcacccaaacagacacatcaacgcaccccactcacagacaccccttaccccacccccactgtgcagagaccaaccatgacacccatcaccaccaccaccacggtgaccccaaccccaacacccaccggcacacagaccccaacaacgacacccatcagcaccaccaccacggtgaccccaaccccaacacccaccggcacacagaccccaagatcgacacccatcac

SEQ ID NO: 7884 - DNA, 371 bp, Homo sapiens
aaaaatatataatttaattccacattaaagccaagctatcgtggtgggaagaaggtgtaaaaatcggtggaaaccctgaaggccgagtacacacacgaagagagagggagttagctgagaagcagcatccagggaaagaaaggtctccacaagctgagatgatggccctctgccctctgaactgttcattaacaagtcaccagtcccagttctttgttcaaatcctcaaacttggagaggcactgctccaatgagacagctacagcaaccacagggaggaagtgctttgggctgcaggagagacagtcaaagccaaatcacgtccaggcgggatgaagtaaacctggaccgaggagcctgacccagctgcg

SEQ ID NO: 7885 - DNA, 476 bp, Homo sapiens; identical to SEQ ID NO: 4636
  misc_feature (1)..(476): n=a,t,g or c

SEQ ID NO: 7886 - DNA, 242 bp, Homo sapiens
  misc_feature (1)..(242): n=a,t,g or c
ggaaatttatttttaaaaaaggtagaagaaaatacctggnaaactattttaaatatatatatatatatctatattttaaaacaatagttaaggtaggcatccaacagcaaactgaagctattgagaaagatcttgcaattattgttgtgggcattttcccccaaaataaaattaatatttgaaaatgctcaatagagggttttttaaagcatagnaatgatatctttcctgttcatgtgtga

SEQ ID NO: 7887 - DNA, 123 bp, Homo sapiens
gatctaaagagaaactgtagattgttttcctgacagcaaaagactaatgtgacaaaatgaagtcattgtaaagaagcgatgcaacttgtcaaatatttaataaagaattatggaagctggaaa

SEQ ID NO: 7888 - DNA, 2058 bp, Homo sapiens
cggtttctgctgggtttctgaactgctgggtttctgcttgctcctctggagatgcagcgtctgttgactccagtgaagcgcattctgcaactgacaagagcggtgcaggaaacctccctcacacctgctcgcctgctcccagtagcccaccaaaggttttctacagcctctgctgtccccctggccaaaacagatacttggccaaaggacgtgggcatcctggccctggaggtctacttcccagcccaatatgtggaccaaactgacctggagaagtataacaatgtggaagcaggaaagtatacagtgggcttgggccagacccgtatgggcttctgctcagtccaagaggacatcaactccctgtgcctgacggtggtgcaacggctgatggagcgcatacagctcccatgggactctgtgggcaggctggaagtaggcactgagaccatcattgacaagtccaaagctgtcaaaacagtgctcatggaactcttccaggattcaggcaatactgatattgagggcatagataccaccaatgcctgctacggtggtactgcctccctcttcaatgctgccaactggatggagtccagttcctgggatggtcgttatgccatggtggtctgtggagacattgccgtctatcccagtggtaatgctcgtcccacaggtggggccggagctgtggctatgctgattggcccaaaggcccctctggccctggagcgagggctgaggggaacccatatggagaatgtgtatgacttctacaaaccaaatttggcctcggagtacccaatagtggatgggaagctttccatccagtgctacttgcgggccttggatcgatgttacacatcataccgtaaaaaaatccagaatcagtggaagcaagctggcagcgatcgacccttcacccttgacgatttacagtatatgatctttcatacacccttttgcaagatggtccagaagtctctggctcgcctgatgttcaatgacttcctgtcagccagcagtgacacacaaaccagcttatataaggggctggaggctttcggggggctaaagctggaagacacctacaccaacaaggacctggataaagcacttctaaaggcctctcaggacatgttcgacaagaaaaccaaggcttccctttacctctccactcacaatgggaacatgtacacctcatccctgtacgggtgcctggcctcgcttctgtcccaccactctgcccaagaactggctggctccaggattggtgccttctcttatggctctggtttagcagcaagtttcttttcatttcgagtatcccaggatgctgctccaggctctcccctggacaagttggtgtccagcacatcagacctgccaaaacgcctagcctcccgaaagtgtgtgtctcctgaggagttcacagaaataatgaaccaaagagagcaattctaccataaggtgaatttctccccacctggtgacacaaacagccttttcccaggtacttggtacctggagcgagtggacgagcagcatcgccgaaagtatgcccggcgtcccgtctaaaggtgttctgcagatccatggaaagcttcctgggaaacgtatgctagcagagcttctccccgtgaatcatatttttaagatcccactcttagctggtaaatgaatttgaatcgacatagtagccccataagcatcagccctgtagagtgaggagccatctctagcgggcccttcattcctctccatgctgcaatcactgtcctgggcttatggtgcctatggactaggggtcctttgtgaaagagcaagatggagcaatggagagaagacctcttcctgaatcactggactccagaaatgtgcatgcagatcagctgttgccttcaagatccagataaactttcctgtcatgtgttagaactttattattattaatattgttaaacttctgtgctgttcctgtgaatctccaaattttgtaccttgttctaagctaatatatagcaattaaaaagagagaaagagaaaaaaaaaaaaaaa

SEQ ID NO: 7889 - DNA, 650 bp, Homo sapiens; identical to SEQ ID NO: 12
  misc_feature (1)..(650): n=a,t,g or c

SEQ ID NO: 7890 - DNA, 498 bp, Homo sapiens
tttgctgtttcttgactgttagttgggccttggctaatgtcatacccatgggctgccacatgggggtggagggatcaggacgaagagaggggaccagagcagggatggaggtccagactcagggagtcggcgcttcttgcagggggttgggggagaggacacggaagcctctgccccatgcaggacatttccttgctgtggcagcagggcagctgtgccctgactaggctgggctgcagagagtgtgagtctcaggtcctctggagccagagccatcaggatgactgcttttcaggggtcatcagtcgctccacctcccgcatgaaccgcagacacaactcttcttgccagggcagagcacacactgcacggccaccggagccccacactcttcttcatgcccttctgcagcatcttgtcccagatatccccaaagtagcccctgtaatgttccatctgggcctcgtcctcagcagtcaccgtggtgacaggcaccac

SEQ ID NO: 7891 - DNA, 334 bp, Homo sapiens
ttttttttctttttcttcttttaattttgttcagcattaaaggagggaacttcataaacattgattgtcatttacagaaaacattcagaaatcatgtgtgcattatccgggaatgctaacagtattgaactaataatttacaggacataaaataaggacaaaaacctattacattctaaagtaatataaaactcttttttaattgttagggagtgctgttttattctagtatatttatgattaaaaaaactcaatacttacttcctaaatgactcaggctgcagttttactcacatacacagaaattagggcttatatatttaaacaaggggag

SEQ ID NO: 7892 - DNA, 316 bp, Homo sapiens; identical to SEQ ID NO: 2659

SEQ ID NO: 7893 - DNA, 445 bp, Homo sapiens
  misc_feature (1)..(445): n=a,t,g or c
catttccagagtttattgcattatacatgcgaccagaacatgcacagaaaggacaggttgctgttgtacttctaccaaaccacagatgcaccacaagggaaaggctacaaggcataaatcgccaatatcccatctcaccaaggacaactgctaaattcatttgtgaaaagatacattgtaatgtgctttttaagtccccctccctccaacttgtgggttttcttaatcttttttttttaaatatatatgtcatttttaaagtactggatgtattcaaaatgccatgagttcatggactaaccacacacatagaccttttgtgttaggaaagacatgaaaaagtcacatttgcngggatggatggatggatgggatgctctacagttccaataagtttaagaccccaatgaaaatgcgcnataaataagttaccccggcattacgg

SEQ ID NO: 7894 - DNA, 365 bp, Homo sapiens
  misc_feature (1)..(365): n=a,t,g or c
gtgtaaatacactttattttccatttttcccgcctgganacatgtgaacaggcagtgtgcaaaatggtggcgggcagtgtagggggcgtgtggagagcgctgcgtgcactgccccggatccccaggcttcgtaacactgaaaagtggccagctaggaagcggggacagagcaggggtcccacccaggaagcgccaggagattgcttgtgacgctactctactggaggctctgggacanccgaggggggacagccagnnggtacatgaggtccgtgggtgggnaannngggagagaaggggcctggggnggcatcgttggattttggcaccgtttctcagttctgattcagcagagacaacgggac

SEQ ID NO: 7895 - DNA, 324 bp, Homo sapiens
gactgtgaggaatttttattttcctttcatgttcactaattgcaagctttcttcatttcggtaatatctaaaatgatctcctcttgtcggaggtagattttcccagtagcttctaactcctgacccagaagcggtgtattgcgcctcagcatggaggaggacgtgaaggcgtacggagtctgggagtagtacaccacgtaggtaggtttgtactggtttggctttgtgtactgtgttccccaggcaattcgaatccagactgcattctcctcagtttctctgaagctgactgtcacattttttaatgctctctgaagaattttc

SEQ ID NO: 7896 - DNA, 345 bp, Homo sapiens
tccatgaattcaaagccttttaatgatgtgaacacttactccccatttcttttttacattgttacaaaaaatttacatacagttttctgaaagtggcattttgttggttgttattatactgatgacacatattaacactttgtattgaagaagtatcataaaaatcacagggcattacagatttttgataagaagtagtaatagcattgtcttttaacagctggaggctcccaggcatactctttggtgagaaatgattaattttatattttcattttgatgagaatcttttcttgtttttaccagttataaaaacaaagctttttctttgttgtgatactgtgg

SEQ ID NO: 7897 - DNA, 316 bp, Homo sapiens
ctttgaatgaatataaagagtttattcggtgcgtatttgggtatacaacaacaaatattaaacaacttttttaaactttttgtgcacaggacagaaaactgcctgtacatgctatgtccacttttggaacacagatttttaacaattatgaatgcacaaaatcttacatatcatgcaactctatgccaagaacccaactttcttccatgcaacagatatgaagatctaaatggaaacctagctaagtcttaaacacttttccagtagcaagtataatatatgttgttgagggaaaaccagtcttaacaattccttg

SEQ ID NO: 7898 - DNA, 383 bp, Homo sapiens; identical to SEQ ID NO: 1552

SEQ ID NO: 7899 - DNA, 280 bp, Homo sapiens
ttttttttcttcagtttttcttcatttctcttcgctgcaaaatttttttttttgtgatggtgggtttttgttttattttttataaaacacttgcactcaagaacatacaaacagtggccaccaatccccacccctggggctccggggagccccctggcttgtttgtggctgttttcctctgtcccttccctggcatctggtgccagagggcaggtgcgggggtcctggggcgggtggaatttgtacagcactttcatggggagatggtcacaagaaagga

SEQ ID NO: 7900 - DNA, 260 bp, Homo sapiens
gagctgtacacttttattgttccttgtctctctacccctgcccagggtaagggcaaacgccttccaagctgtccaagggcacccgcctggccatggttaggttctcctagttgccctctaccagcagccgtgtgtgggtgctgtcctggccggcctggcagcagtaagtgccttggtcctcaggtcgaacgtcatggatgaccaggctgtgggtggggccgtggctgcgcatctcatacttatctcccgggcacagctcg

SEQ ID NO: 7901 - DNA, 330 bp, Homo sapiens; identical to SEQ ID NO: 453

SEQ ID NO: 7902 - DNA, 538 bp, Homo sapiens
  misc_feature (1)..(538): n=a,t,g or c
ttttttttttgctagtcacaaagcccaactttttattgaagtataacatacacacagaaaagtgcccagatcaaaagtgtacagctccaagaatgttcacaaacggaaagcacccaggtaaccgggcaaccagatcaagaaacagaacaccccaggaagcaccacctcatgcccccttctggttactgtcttcttagggactgatctctacttggcaaccgcatgggatggaattttggctggggttttaaactttatataaatgggaatcctatgggtgcatttttgccttatctcgttcaacactaggggttgggtgaatacacttccaaggttggggggtgggagtttgcaggcttcatttccccatttgncagtctnggggatttcccttcgtgtggaaatattacccctaattgtggctttattcccggnccaaacnggggggctttggggggtgtttttcccgtttncaggggtttttttttggggggagtttttttttgtngaaggttttagggggcttttttttntgggg

SEQ ID NO: 7903 - DNA, 495 bp, Homo sapiens; identical to SEQ ID NO: 1792
  misc_feature (1)..(495): n=a,t,g or c

SEQ ID NO: 7904 - DNA, 422 bp, Homo sapiens
aaaggaaaaaagtaaaattgtttattttcctcccaagcaaaacaaaatgaacaagttcaatcaaaaacatcccaatggaaaaaaatcacactaagaataaaacacttacagaacggcaagaaaactgggttaacatataaatttgtgtctgttgaaaccagagtacatgctagaaaacattaacacagatacgacagagtgtggtttttttttagaaatgggtaatttctctctccagtatcctttcacttgtatgagatatttctcctctcctgttttcacaaaccaagaaatccccaggtaggccaatcccagaggtgccatttagcagtatgcagcagcccagtttcagcataacaaaacatgccttggtagtggctctctcatgcaaataaaagaaagcttaagaaattcttgttgta

SEQ ID NO: 7905 - DNA, 320 bp, Homo sapiens
ttttttttttttttttttttttttttcagtattcataagtgtttaataaaaacaatctataacttaaaaattacaaatttatatagttagcccgttttgcatcactataaaggaataactgaggctgggtaatttataaagaaaaaaggtttgttttggcttacggttctgcaggccatactagcacggcaccaatatttgcctggcctttgatgaaggccccaggaaggttacaatcacaatggaaggcaaagggggagcagactcttttaagccaccagatctcacacgaactgagtgagaactcactcatcaccagt

SEQ ID NO: 7906 - DNA, 108 bp, Homo sapiens
  misc_feature (1)..(108): n=a,t,g or c
gatcanagaaggttggggtccagaaaggcatctgtgtgatggttccattgatgtgggatttccctacttgctgtattctcagtttctaataaaaagaaccaaatgaaa

SEQ ID NO: 7907 - DNA, 346 bp, Homo sapiens
  misc_feature (1)..(346): n=a,t,g or c
tttttttttttttttttttttttttttaacgttttcaaataatttattaggaatttaaaactgaaaataaaacctggaaaaagaagttacagatgtggagagaagagacaccggagatggtaacttgctggcttcgaaacaccatgtaacatcttaaaaaaaaaaaaaatcccaaagcaaatcagaaaacggaattccagggtcctgagcccatggttggnccagtggggtggaagggtccgggaatgagggagagggaagctaagtgtcncaggnctcagctcaaacgngtagaaaattaaaaataaaaaccaataaaatgcagcttctcttttattaggaanca

SEQ ID NO: 7908 - DNA, 565 bp, Homo sapiens
aaggagttgagtgatttattgagtgcttacttggtgccatggcatgtgctaggtgcttacctaaatcaactcattggatcctcacaacaaccctgtgaggtgggtttcataacccccactgtttaccgatgaggctcacagaggctatgtaacttgcccaagattctgcagctggtaaaggacggaatctgtgcctctgcactaccaatgcctgctcctgaaggaaggtttgtgagggtgaatttctcaaagtcacttcaggtccttactgtagcgacagtgttggcaccttctgtgtcctctctcaccttgcctgtgagccttccagtgggtgggaaaagaggcgtgcctatcagtggccattctgtgaacacagaagagagctgcgctggccacagagaagatagtccaatgatccttaaagttcaggcgtgtgggttggagccaaaggggcctgtccctggatataacttgagagtagtctggagaggaatttagaagataggatcctgagccggtgctgtgcccatgttagttctcccttcactcatgtaatcctcgtgcc

SEQ ID NO: 7909 - DNA, 370 bp, Homo sapiens
ttttttaggttttaaaatgcttcccacttttatttcctgtttgggagaagtctgtcgctgtggcaagttccgtcgtcttcccacagccctgtctgcagcggtagctcgtctccaatccggcatcttgcctttagctatcaattccatgatgtagccaaattcactcatctccccagactccgacatgtttacaccccttcacaaactctggaggaccgacgcgggtgtatcgaatttgtcctttcttttctctttttctgtttttagtctgagttttgccgagctccccgcccataagctgttaaccaggaaaagaggggaagcgccggggaaagcaagaagcgggcttgggtgaaatgaaggccatcga

SEQ ID NO: 7910 - DNA, 342 bp, Homo sapiens; identical to SEQ ID NO: 2216

SEQ ID NO: 7911 - DNA, 501 bp, Homo sapiens
ttttttttactcaaatgaccacatgccactctaatagagacaaatacttttgtgagttgatagaggtctttatgatgaaggcctgagatctacaaatagaaactagtataagcagagtgcaagtagaaagagaaggccccaggtctcatgcacttaaaaataattagcatttaacagttctgacgtacagattttcaccctaacatgattgtagcaaaatgatcacagaacttggaaaccagtgtggctggctataggcataggcaggatagggaccagtacttaagagctgtggggtcccagttctgggctttgacttctggcgtcaaagttaattgaacaatggtgtcaggattatatcttaattggaaatattgagtatgactgagttgaaatactgtcctcttcttttctatttggccatatgtcccagagctcttaaagcacaaaggtcccacatgtaagtaaggctgttccctacgtggctacatggagagtcta

SEQ ID NO: 7912 - DNA, 1366 bp, Homo sapiens
cgcagaactcagagctgctcttcctctgtggccagttggggaccagcatcatgaagtggatggtggtggtcttggtctgcctccagctcttggaggcagcagtggtcaaagtgcccctgaagaaatttaagtctatccgtgagaccatgaaggagaagggcttgctgggggagttcctgaggacccacaagtatgatcctgcttggaagtaccgctttggtgacctcagcgtgacctacgagcccatggcctacatggatgctgcctactttggtgagatcagcatcgggactccaccccagaacttcctggtcctttttgacaccggctcctccaacttgtgggtgccctctgtctactgccagagccaggcctgcaccagtcactcccgcttcaaccccagcgagtcgtccacctactccaccaatgggcagaccttctccctgcagtatggcagtggcagcctcaccggcttctttggctatgacaccctgactgtccagagcatccaggtccccaaccaggagttcggcttgagtgagaatgagcctggtaccaacttcgtctatgcgcagtttgatggcatcatgggcctggcctaccctgctctgtccgtggatgaggccaccacagctatgcagggcatggtgcaggagggcgccctcaccagccccgtcttcagcgtctacctcagcaaccagcagggctccagcgggggagcggttgtctttgggggtgtggatagcagcctgtacacggggcagatctactgggcgcctgtcacccaggaactctactggcagattggcattgaagagttcctcatcggcggccaggcctccggctggtgttctgagggttgccaggccatcgtggacacaggcacctctctgctaactgtgccccagcagtacatgagtgctcttctgcaggccacaggggcccaggaggatgagtatggacagtttctcgtgaactgtaacagcattcagaatctgcccagcttgaccttcatcatcaatggtgtggagttccctctgccaccttcctcctatatcctcagtaacaacggctactgcaccgtgggagtcgagcccacctacctgtcctcccagaacggccagcccctgtggatcctcggggatgtcttcctcaggtcctactattccgtctacgacttgggcaacaacagagtaggctttgccactgccgcctagacttgctgcctcgacacgtgggctcccctcttcctcttgaccctgcaccctcctagggcattgtatctgtctttccactctggattcagccttctttttctggactctggactttctctaataataaatagttcttctaaaaaaaaaaa

SEQ ID NO: 7913 - DNA, 332 bp, Homo sapiens
  misc_feature (1)..(332): n=a,t,g or c
gatcgagaatgtttgcaacgaccgnctggggaagaaggtccgcgttaaangcaacacggatgataccatcggannnccttaagaagctgattgcagcccaaactggtacccgttggaacaagattgtcctgaagaagtggtacacgattttaaaggaccacgtgtctctgggggactatgaaatccacgatgggatgaacctggagctttatnatcancnnnatgagaatcctcatcttcctgccccgctttcctctcccatcctcatcccccacactgggatagatgcttgtttgtaaaaagggaccttaataaagacttagatgttgaaa

SEQ ID NO: 7914 - DNA, 376 bp, Homo sapiens; identical to SEQ ID NO: 6276
  misc_feature (1)..(376): n=a,t,g or c

SEQ ID NO: 7915 - DNA, 291 bp, Homo sapiens
tggaaaatcactcctttgtctttattaaagaaacttagaccagacctggcaatcaaggggtgaggtactggccaggaaggtggagtaggtttcaggccctggggatttcaagtgcagactgatggcctgggaggggccaaagagaccagatcctggcagcagctgaggaggtgcccaagggactgttcaggcactggggccatcagctggttctgtgggcaggggttgggggttgggatgcagggtagtttgggctggcctggaatctccctgaggccaccctgccttgtc

SEQ ID NO: 7916 - DNA, 354 bp, Homo sapiens
  misc_feature (1)..(354): n=a,t,g or c
ttttttttttttttttcaatagaaacactgtttattcaaatgacaggcaggaagcggtggagcagcaggggggaaagggaaccaggagggctgggagtgcttccctgtgtcccctgcaatcctgcttggcaaccacccgctgttggcatcagggtcagaaatactttccctcctctccctcctgccccaaactgaataaatagcatccctntccccacgagagctaggggagantcatgtgctgagtttggtgccccagtcacaagcccagagtcccggtgagggcagaagttcaaaatggcttttagggngtagaatacaaaantgttctactcattcncaccttcctcttcc

SEQ ID NO: 7917 - DNA, 2461 bp, Homo sapiens
  misc_feature (1)..(2461): n=a,t,g or c
agccttcgctgccaggaccgtggtgaagcctctgggcttcctgaagcccttctccttgatgaaggcttccagccgcttcaaggcacaccaggatgccctgccacggctgcccgtgccccctctccagcagtccctggaccactacctgaaggcgctgcagcccatcgtgagtgaggaggagtgggcccacaccaagcagctggtggatgagtttcaggcctcaggaggtgtaggggagcgcctgcagaaggggctggggcgtcgggccaggaagacggagaactggctgtctgagtggtggctcaagaccgcctacctccagtaccgccagcctgtggtcatctactcgagcccaggcgtgatgctacccaagcaggacttcgtggacctgcagggtcagctccgatttgctgccaaactcattgagggtgtgttggatttcaaggtcatgattgacaacgagaccctgcccgtggagtacctggnggggaagccactgtgcatgaaccagtactatcagatcttgtcctcctgccgagtgccgggccccaagcaggacacagtcagcaacttcagcaagaccaagaagcctcccacgcacatcaccgtggtacacaactaccagttttttgagctggatgtgtaccacagtgacgggacacccctcactgcggatcagatctttgtgcagctggagaagatctggaactcatccctacagaccaacaaggagcctgtgggcatcctcacctccaaccaccgcaactcctgggccaaggcatacaacaccctcatcaaagacaaggtgaaccgggattccgtgcgctccatccagaagagcatcttcaccgtgtgcctagatgcaaccatgcccagggtctcagaagacgtgtaccgcagccacgtggcaggccagatgctgcatgggggcggcagcaggctcaacagcggcaaccgctggtttgacaagacgctgcagttcatcgtggcagaagatggctcctgtgggcttgtgtacgagcatgctgcagcngagggtttccctattgtcacccttctggactatgtcatcgagtacacgaagaaacccgagcttgtgcngtctcccatggtgcccctgcccatgcccaagaagctgcggttcaacatcacccccgagatcaagagcgacatcgagaaggccaagcagaacctcagcatcatgatccannacctggatatcaccgtgatggtgttccaccattttggaaaagacttccccaagtcggagaagctaagcccagatgccttcatccagatggctttgcagctggcctactacaggatctacggacaggcatgtgccacctatgaaagtncntccctgcgcatgtttcacctgggccgcaccgacaccatccgctcggcttccatggactcactcacctttgtcaaggccatggatgactccagcgtcacggagcaccagaaggtggagctgctgcggaaggccgtgcaggcccaccggggctacaccgaccgggccatccgcggggaggcctttggtcgacacctgctgggcctgaagctgcaggccatcgaggacctggtgagcacgcccgacatcttcatggacacctcctacgccatcgccatgcacttccacctctccaccagccaggtccctgccaagacagactgtgtcatgttcttcgggcccgtggtccccgacggctacggtgtctgctataaccccatggaggcccacatcaacttctccctgtcggcctacaacagctgcgcggagaccaacgccgcccgcctggcgcattacctggagaaggcgctcctggacatgcgtgccctgctgcagagccacccccgggccaagctctgagcccctaggactcaggcctgccaatgccacagccaagcccaccctgggatgggccacccaccagggctcagctccttggttccctcttccttggttccctcttccctggtcccccnnaaatgtactgagccacggaccgcatcctccagggacctgcaggccccagccaagtgccttccgtgggtcatcccagcacctgccagggcccgacctggggctgagtgcagaggctgagcaggacgttaggcccgggcccctggcacgtcctccaccggtgcctcctctgggaaagggaaccaccctccagagcaggagactggcaagagctctttgtctcaccagctcagccccggccactccctgccaactccatgaccaggccaccatctgtaccctgcttcccaaactcccaggcctggagacaggattgtctggggncgaggggccagggtgtgaggtttcacctccgttgcggctgtgctcctgtggataacattgctagcgagccgcctctggttccactcagcttggttcctgcccccgccctgctgtatgatattaatgtggaaggtcatcaataaaggg

SEQ ID NO: 7918 - DNA, 463 bp, Homo sapiens
tgctacaaaatgcatttatttccagtcagacaaaattcttgaactgtatattcgggtacatattataaggtcatctttgatatatgccctgtttacaagatccatttctaattattaaagtgaatatcaaacacacatctttgcatcttaaaacataaataaactgctaatgtttataagccacaaatctggtcactgacatgagtggcctgcaattcttcagtgatgagcacacggcgatacagacaagatcagattacccaggtaggcaggcagcaggcacctgtaattcacccgctgactgtgctgttgtggcagtgacccttcttgtgaaaaaagagttatgtgcagacaaaagtgtggacatatggcaacgtggagagggcattttcacagaatgcaaacaccatttcagggaaattagtagactccagaatggatgaaagcttcatggatgccaacc

SEQ ID NO: 7919 - DNA, 253 bp, Homo sapiens; identical to SEQ ID NO: 4030
  misc_feature (1)..(253): n=a,t,g or c

SEQ ID NO: 7920 - DNA, 336 bp, Homo sapiens
  misc_feature (1)..(336): n=a,t,g or c
ggtgacacatctccttttcacgtttatttcattttgttttaagatcacagaagagcagagcattcatacgtgtaaagtaacagaagagagaaacagaatttaaatacatttaaaaagaaaagaaaaaaagctttttttcattttaattttaattttttttttttaacacacattgcgctttttatctccttcacagagctagtacccagggaaaaaaatccacctaataaacaaaaatgaaaaaccttgaaaaacaaaaaatcccaaacaaaaaatggccatgtgtttgtatcttcaagggaggntcagtttcatgtctacagggctgaaaaaggg

SEQ ID NO: 7921 - DNA, 533 bp, Homo sapiens
  misc_feature (1)..(533): n=a,t,g or c
ttttttttttttttctcatcactgagtatttattatatataacaaatacatgggaaagaaaaaactatattgtgtgatataaatagtttatttacattacagaaaaaacatcaagacaatgtatactatttcaaatatatccatacataatcaaatatagctgtagtacatgttttcattggtgtagattaccacaaatgcaaggcaacatgtgtagatctcttgtcttattcttttgtctataatactgtattgtgtagtccaagctctcggtagtccagccactgtgaaacatgctccctttagattaacctcgtggacgctcttgttgtattgtctgaactgtagtgccctgtattttgcttctgtctgtgaattctgttgcttctggggcatttccttgtgatgcagaggaccaccacacagatgacagcaatctgaattgttccaatcacagctgcgattaagacatactgaaatcgtacaggaccgggaacaacgtatagancactgtagtcctttttttcacagtg

SEQ ID NO: 7922 - DNA, 425 bp, Homo sapiens; identical to SEQ ID NO: 1941

SEQ ID NO: 7923 - DNA, 415 bp, Homo sapiens
ttttagttaaaaatgaactcgatatgtttaataaagcttggtattaccaaaatcgcggtacaaacatcaagtcacacgcccacacgacagaattccatttacaaaatgttcctcgggaagcctccaccgaacccgtgcccaaagagagcccgaaccaagcctggggtctctgggtgggcagaaaacgtgagtgcgggggttgggggaactcgggggagggggaggagggcagggaggagggcaagtggagagaaacgcagactcaaaagcagtccatataacagctcaaaaagagccagccggggatattatcacaatgatacagtacaaatcaaagcaaaaatcaaaatcattcggctgataacagcaggctacgctgccaagaacccagatggcagccttcttgcggccatcc

SEQ ID NO: 7924 - DNA, 3150 bp, Homo sapiens; identical to SEQ ID NO: 2790

SEQ ID NO: 7925 - DNA, 438 bp, Homo sapiens
  misc_feature (1)..(438): n=a,t,g or c
ctgagtaacaacctttgatcgatttattaattagaagctatttataccagtagaaaaatacccacaaacaattaaaattataagactatttttaaattcataaaaatggtactgtactgggtgtgactacatttccagtttttggtgtctcatgtgatacagaatcaggaggacttacatggctggnggggaggggagctgttttcctaatttgttactatttaaaaatgggttaagggtgggccacatcttggggggcttctcctttaatgtaaagtcccttttgggaatatcacttaaaatctggggacagggtcaaatcagctggctactctacacggcccgtgtctggcagtacagggcgtgggtgaggaagnccctntaccctcacttcgggcagngtcttnacccttggctgnttcgcagcaacggatccgg

SEQ ID NO: 7926 - DNA, 2872 bp, Homo sapiens
tccaggaatcgatagtgcattcgtgcgcgcggccgcccgtcgcttcgcacagggctggatggttgtattgggcagggtggctccaggatgttaggaactgtgaagatggaagggcatgaaaccagcgactggaacagctactacgcagacacgcaggaggcctactcctcggtcccggtcagcaacatgaactcaggcctgggctccatgaactccatgaacacctacatgaccatgaacaccatgactacgagcggcaacatgaccccggcgtccttcaacatgtcctatgccaacccggccttaggggccggcctgagtcccggcgcagtagccggcatgccggggggctcggcgggcgccatgaacagcatgactgcggccggcgtgacggccatgggtacggcgctgagcccgagcggcatgggcgccatgggtgcgcagcaggcggcctccatgatgaatggcctgggcccctacgcggccgccatgaacccgtgcatgagccccatggcgtacgcgccgtccaacctgggccgcagccgcgcgggcggcggcggcgacgccaagacgttcaagcgcagttacccgcacgccaagccgccctactcgtacatctcgctcatcaccatggccatccagcgggcgcccagcaagatgctcacgctgagcgagatctaccagtggatcatggacctcttcccctattaccggcagaaccagcagcgctggcagaactccatccgccactcgctgtccttcaatgactgcttcgtcaaggtggcacgctccccggacaagccgggcaagggctcctactggacgctgcacccggactccggcaacatgttcgagaacggctgctacttgcgccgccagaagcgcttcaagtgcgagaagcagccgggggccggcggcgggggcgggagcggaagcgggggcagcggcgccaagggcggccctgagagccgcaaggacccctctggcgcctctaaccccagcgccgactcgcccctccatcggggtgtgcacgggaagaccggccagctagagggcgcgccggccccgggcccggccgccagcccccagactctggaccacagtggggcgacggcgacagggggcgcctcggagttgaagactccagcctcctcaactgcgccccccataagctccgggcccggggcgctggcctctgtgcccgcctctcacccggcacacggcttggcaccccacgagtcccagctgcacctgaaaggggacccccactactccttcaaccacccgttctccatcaacaacctcatgtcctcctcggagcagcagcataagctggacttcaaggcatacgaacaggcactgcaatactcgccttacggctctacgttgcccgccagcctgcctctaggcagcgcctcggtgaccaccaggagccccatcgagccctcagccctggagccggcgtactaccaaggtgtgtattccagacccgtcctaaacacttcctagctcccgggactggggggtttgtctggcatagccatgctggtagcaagagagaaaaaatcaacagcaaacaaaaccacacaaaccaaaccgtcaacagcataataaaatccaacaactatttttatttcatttttcatgcacaaccttgcccccagtgcaaaagactgttactttattattgtattcaaaattcattgtgtatattactacaaagacggccccaaaccaatttttttcctgcgaagtttaatgatccacaagtgtatatatgaaattctcctccttccttgcccccctctctttcttccctcttggccctccagacattctagtttgtggagggttatttaaaaaacaaaaaggaagatggtcaagtttgtaaaatatttgtttgtgcttttcccccctccttacctgaccccctacgagtttacaggcttgtggcaatactcttaaccataagaattgaaatggtgaagaaacaagtatacactagaggctcttaaaagtattgaaaagacaatactgctgttatatagcaagacataaacagattataaacatcagagccatttgcttctcagtttacatttctgatacatgcagatagcagatgtctttaaatgaaatacatgtatattgtgtatggacttaattatgcacatgctcagatgtgtagacatcctccgtatatttacataacatatagaggtaatagataggtgatatacgtgatacgttctcaagagttgcttgaccgaaagttacaaggaccccaacccctttgctctctacccacagatggccctgggaacaatcctcaggaattgccctcaagaactcgcttctttgctttgagagtgccatggtcatgtcattctgaggtacataacacataaattagtttctatgagtgtataccatttaaagattttttcagtaaagggaatattacatgttgggaggaggagataagttatagggagctggatttcaaacggtggtccaagattcaaaaatcctattgatagtggccattttaatcattgccatcgtgtgcttgtttcatccagtgttatgcactttccacagttggtgttagtatagccagagggtttcattattatttctctttgctttctcaatgttaatttattgcatggtttattctttttctttacagctgaaattgctttaaatgatggttaaaattacaaattaaattgggaatttttatcaatgtgattgtaattaaaaatattttgatttaaataacaaaaataataccagattttaagccgcggaaaatgttcttgatcatttgcagttaaggactttaaataaatcaaatgttaacaaaaaa

SEQ ID NO: 7927 - DNA, 370 bp, Homo sapiens
tttggtaaagacttttaagagaaagaagtattttaaaaagtagcagtgctctgaggctcagggtgtaggatcgggggcacagcctggtcccgggaggccccttgtgcacaggtggtggcccagggcaacgatgctcgctcttgggggacgcgcggccgggggacgcgccatgtgtccggcccggggctcccggcgggctccggcggcagggacaatggcgaggccgctcaccacttgaggaagaccatcccggccaggacggtgtagcccagcaccaggaagaggaccttgagcagacggtcactcttctcctccagctccttggccaggatctccaggaaggtgatgaagaggaaggtgccgcccgcca

SEQ ID NO: 7928 - DNA, 204 bp, Homo sapiens
  misc_feature (1)..(204): n=a,t,g or c
cncgtttccccgactttattcagtggcacgtncacagcggggatgggggtagacacaaggtggggcctgacctgtcctggagccctgggggcaccacacaccatgcactatggatggaagggggcacaggaggggcttggtggccccacagaagcctgtntaccaggnaggaggcggtgagtncctggttccccctagcccagg

SEQ ID NO: 7929 - DNA, 1206 bp, Homo sapiens; identical to SEQ ID NO: 5536

SEQ ID NO: 7930 - DNA, 384 bp, Homo sapiens
ttttttattccaatgaataataatcacactttaatataataacaaacatacaatacattaaagttagaacactactttgataagacaatcatactcaagctaagatacaaggtacagacatactgaaattgtaaagtgaccattttaatgtttgatatttacttctcttattggcacaagactaataagatagatgggttgtattactcttaaaatctaagacttctcctctagctcagggaaaatactggtggaaacctgttttacccaaaagcagctttaatatctgtttaaccaggttattctataataagaactccattttaatgcacgttatccattacaaatgtgtgagatattctataaaacacatatttaaaggtc

SEQ ID NO: 7931 - DNA, 220 bp, Homo sapiens; identical to SEQ ID NO: 6402

SEQ ID NO: 7932 - DNA, 326 bp, Homo sapiens
  misc_feature (1)..(326): n=a,t,g or c
gaggnggaaggcatttatttgctttgncttgctaacccncaaaatcaaagcctgtcccagcctgacagcttccagcagaaagtgtcaganccagaggcccagccaaggcccaggcaggnaggcggtcctcctgggccctggcattgttcttacacatggagggcatggccatcttctctttcagggacaggctggcctgacatggaaggtgaaacaaggcagcagcccctgcctccaggngaactntgcagantgcagtgccggggagctgaggggtcctgggaaggagctatggagtcccntccagcaggttacagccacatcct

SEQ ID NO: 7933 - DNA, 2964 bp, Homo sapiens
ctcgaggaccgccgccatgtagacgggcgcgccggcccccacccgctccgcgtagttgcctttgcgcagcaagcggtgcactcgccctaccgggaactggaggccagcgcgggacgagcgcgacttggccttggcgcgggccttgcctccttgtttgccacgaccagacatgactgaaatcaaggttaaacacagacaacgctcagaacctcgcaacaaaataagattgaaagagaaccaagaggaaagcctttataagctttcctaggggtggggtcaagaacgagtttttcattggtcctaatatggcttcagaaccggccaatcaagtcaagagtcggtgttgttacgtacgcattgctgaaaacgcaaggtccgcacaccgaatggaaatgaacgactttcggagccctaatttgcataaggtggttataaaagaatcaggccgccattctcttacttcttttcttggctaagccgcgtttgtactgtgtcttaccatgcctgaaccggcaaaatccgctccggcgcctaaaaagggctccaagaaagccgtcaccaaagcccagaagaaagacggcaagaagcgcaagcgcagccgcaaagagagctactccatctacgtgtacaaggtgctgaagcaggtccaccccgacaccggcatctcgtccaaggccatgggcatcatgaactccttcgtcaacgacatcttcgagcgcatcgcgggagaggcttcccgcctggcgcactacaacaagcgctccaccatcacatcccgcgagatccagacggccgtgcgcctgctgctgcccggcgagctggccaagcacgccgtgtccgagggcaccaaggcggtcaccaagtacaccagctccaagtgagtccctgccgggcactggcgctcgctcgctcgagtcgccggctgcttgactccaaaggctcttttcagagccacccacctaatcactagaaaagagcttgttcacttattcccttagtttcttttcataaagtaagttattttagtgtgaaggtcatgggaaatggcatacgtagctttttaactatttggaactcgaggtccccagtgcgtcattggatttgcttttgaatctagagcgtgtctttactcattgtgctgcttagccttcccaggagtcggttctcaattaggctgttgggaatccgcctctttacccgcccccactcccgccccacacgcgccctggtggctccttgggtttgtttcattctaaaacgaagtggctgagttcggctgtcatttaagagaactccaggacacaattcagcccgggttccgcaaacactgcgtgacagctctgtatgactgacgcttggcagcagcttttgtgtccggtcaccagttctgccgtgcgatggggcctcctgtggataccagccgttctgtgtattttggacgaaggcggcagccgggtcccagccttgtcctgattgggcgacaagaatattcaaaattctgcgcctttttctaatttgtagatttcagtttccgtcgttcactttgagactttgaaattcctatttctcattttgttgataatttctgcatttaatggtctgtgctttaaatggtaacgctacggccccaggtcactgcgaggcacttaccatgtagatacgggctcaaaagtcacctctcagagacctacgtcatccactcaggaattcgcgcctctcatacttgcctgtctcattttatcttccttctagcagctgtctgaaattggttcgtctgttttcttgtttatggtattctcaagcccttgacagaccggctagtgtggttttcccgtgcatcttcagcctggcacattatggacacttaaatactacgtattgatctaatattgttgggttaatttttccatcccacccttttcttaatcgcttccgtggatggatgaagggtgctgttcatttccattagatgtatgtgaaggcacagtgaaaatggaaatgttcttggagctacttcctcaaaatgtatccttagtcacctcagtgcaacagctgggagggggccgtgttaagattttttttgctacaaagaggaggtggcaatggtagatccacccttatgcttgctcagtttagcataacctcttatggattttcatcaaattcagcgtgttggtcactggaaagagccttttccttctccttttcttactctcccctcatggtgttcccctcttaaaggaggaggagcttttaatttacacttaccacctcatttgcttttctggaggccatgcaatataggcgggactacagagttaatctcctttttacaaatgaggccaagagaagcctcattggttcacagtcatgcagctcatactgtccacccttgtattctcagatgcaggacaattgcattttagttttattttgtggaggtgcagaatatttactctttctgtccaacccttgattctgccgaggaagacactgatggtttgatgagtgattcagctgtttttggctaagggcttttggagctgatggcaggggtttgatgaatccaaatgagctctagacattatcacagactgaatagatcttaactgtctcctacatgtgtgttttcaaatgtgtatagatgctattgttattaataaagttaccaattaatttaaaggctttgctggattcttttatctacagtgtattttctcaatgaatgaaattaacagatacaacttccactgtgtctgtagaaaagcgtgggtgcctctgatctgggggatgactatttataagccaccagccaaactgctgccccaaaggtgcactggggctgaaatagtctgttacaaggccactgttaatgcttagtaattgaaaatatatgatcacaatagacagcagtacaatagatggagaataagttcatataagatcgtaacaccactagagcac

SEQ ID NO: 7934 - DNA, 394 bp, Homo sapiens
  misc_feature (1)..(394): n=a,t,g or c
gattatttaacatcgtttaataaaaaagtagtagtgcaaacaggaaagtagcataaaaatatagtgttgtngtggnnngctggtgcttgctgctgagaagctgaagccagannnggccaggtgtgaggnaggaggattctttaaaggcaagaagagagaggcctgcctttaagagccaagagagccgctcatccatgaccccaacacagagctctgtagaactgctgtcacaccccaaacaccaacataagggggtgagagaatgaactccagccgcttctcccaacacaacccaacagagctattctgggacatngtgtgtttncgagcttgtgtgttggagagcaccaaaaagctcattcagctngccccaggccttcngtgcnggtctcgg

SEQ ID NO: 7935 - DNA, 3768 bp, Homo sapiens; identical to SEQ ID NO: 1231

SEQ ID NO: 7936 - DNA, 274 bp, Homo sapiens
ttttttttgaaaaatatttatgtggagtttttaatccatattagaattcagttgttgtaacttgaccataaatttaaacagaaaccatcttctgagacatacattctaataaatgtatcaacagtactgatagtcaacgaagggtcaatttaaacttattagtaacatttcatttttctatccaacagaaatctatagtggtttgcccattacatatctgaaacattgtcttatgaaaacaaaatgaaacaaaattaaataaatgaagataaaa

SEQ ID NO: 7937 - DNA, 419 bp, Homo sapiens
ttttaagtttcaacctttttattcaaagcagcttctcacaatgtataaatactgcatattagcacacatgaaaaatacaacttctaaggcacccagaaatgtgttcatacacgttacaggaccattcacaaagagagtgtacaatttgctctagacagtcaggatttgataaatcagaagattattatccctcagtactgcacccagtctcagtaaatatttacaacatggtgagaaggggtcagctgtaccttctttataattctatgaagtactcagacttacaaatattcagaactagttaaagactctcccatggataatctgggcaaaataaaacaagtagcctaattttggcaaagggtctcgggtgggattttgggtggtatgcttacatccatgattcaaatcccaaacac

SEQ ID NO: 7938 - DNA, 318 bp, Homo sapiens
  misc_feature (1)..(318): n=a,t,g or c
ttttgaacacgtatgtgtctgtttatttcaaggtgtggaacacagacacatccccagatggggnaggaggggagacaaggacacgggtacaaaaactggaaacaaagccacccgctacagctcagacggcaccgccacgatgtggtttaaggctctgtacgtatatatatgtgtagaggctcacacacgcgcacacgcacacgcagaggcgcactgacacggggactgaggccagacgtgaaggctgactgcagctcgcagcccacctaaaatattgcaattatgtttattaaaaaagtgtaaaatgggaagactgtg

SEQ ID NO: 7939 - DNA, 265 bp, Homo sapiens; identical to SEQ ID NO: 2233

SEQ ID NO: 7940 - DNA, 350 bp, Homo sapiens; identical to SEQ ID NO: 24

SEQ ID NO: 7941 - DNA, 469 bp, Homo sapiens; identical to SEQ ID NO: 2160
  misc_feature (1)..(469): n=a,t,g or c

SEQ ID NO: 7942 - DNA, 454 bp, Homo sapiens
  misc_feature (1)..(454): n=a,t,g or c
ttttttttttttttttccctttcttcatgcatttattaagatgaaatttacataacgaaccatcttaaagtgaacagttcagtggcatcgagtgcatttgcaatgttgtagaaccacgactttagttccaaaacatttccncccccannaagataaaactccgtacccattaaacagtttcttcctatgccttcaccctgangcccccggcaggctataaatatacattttatttttatagggtttacctcttctgggatatttcatatagggngggaatcataaaatgtgtggaccttttatgtctggggttctttacactgnggcataaatgcttccggggggttcatttcacatggcggcatatggtggaggtgctggtatttccncttttcnggggctgaggtaggtaggtccctttgtttggggtgggggcttaccatttggttnttgg

SEQ ID NO: 7943 - DNA, 323 bp, Homo sapiens; identical to SEQ ID NO: 2127

SEQ ID NO: 7944 - DNA, 380 bp, Homo sapiens
gaaccaatcaatcactggagacacacagactccacctgtatcaaacgaggataccagccacccagacagccccagtcccagctccatccatcctgcaatccctcctccacagcacagcacagcccagacgctgcctctgggaaggaagcctgaggcagagttgctgagcctctgggaaaatctggaaatttggtttccccaagatagactccacctcctctggaaagatgctgtgctcctgacagggctttgtctccctgggaaggaatccatgtcttgggaaggctctgaatcccaggaaaggttccacacctgcaggagggactccttggtcctgaagggactctgtggcctgcataggttccagtccttaagaagga

SEQ ID NO: 7945 - DNA, 546 bp, Homo sapiens
cttttatgcagagtttgattatgctttatttttaaaaatcacattcttccccattcccagccaacgaacaacactattcattctgaaataagaaaatgaaagaattttgagaagtcacacaacattgctgtaaatttcattttttttttttttactaataaaacagatgcttctttctcagagatgggttttcactttcaacatgcgtcatagcatctgattttctgagccatcttgggaaatggagtctttcctaatgtcattgaatgtggtcaaagctatctacaaagcagagacagtaggctcttggtgaatcagtttgggaaattcacaattaagcagtctcagggagtgaaattccggggtctgatgagactgtggaaaccatgtggtactgtagggagagcacaggtttggatgccagacaaatatctaaatctaaccctaatccactgcttataagcttagtgattgttgcacaagttgtttagcttctctgagcttagatacctcactgtaaaatgggaataatacctctttttagtg

SEQ ID NO: 7946 - DNA, 5260 bp, Homo sapiens
tggaaacagaggagcaagcctgttgtaatcgctacgcccacttggtggcctataaaggaagcgggcgaaccccggcagccctacacaacttggggcccctctcctctccagcccttctcctgtgtgcctgcctcctgccgccgccaccatgaccacctccatccgccagttcacctcctccagctccatcaagggctcctccggcctggggggcggctcgtcccgcacctcctgccggctgtctggcggcctgggtgccggctcctgcaggctgggatctgctggcggcctgggcagcaccctcgggggtagcagctactccagctgctacagctttggctctggtggtggctatggcagcagctttgggggtgttgatgggctgctggctggaggtgagaaggccaccatgcagaacctcaatgaccgcctggcctcctacctggacaaggtgcgtgccctggaggaggccaacactgagctggaggtgaagatccgtgactggtaccagaggcaggccccggggcccgcccgtgactacagccagtactacaggacaattgaggagctgcagaacaaggtagggcctgctggtgggaggggtctccggggggcatgacttcttccccccaactcctgccttggccaaaggcctggagtccagccatagggtctcagggagccaagggtggtttggctgtggcttagcttctgggaacctgccttggggcccctgtgtggctcacatcccccttttctggggacagcaagctgagtcaggaacaaagaggccttgtggagccccttggagcctcagtttctccctcgtggagctccgccacctggagaggttgtaggatgaggcaggaggatgcagatggagggctgggcccgtgggctgctggatgtgtggtgtcttgctcctttggagcaggggtcaacaggagggggttttgggtgatgtggagtgggggtgtctgagtgagctcctgatagcacctgctgcaggaggaggcagaaaggagggggcgggacctcagtgtggggaaggcctctgatgtgccttatttggggatttttctggcttctcctttcctcctgctgtcccttaagacgggctcagcaaaccccagggggcggggctgctggctggcgcccagggttagggattaggaggggtcctgacttttgatttggaaccactctttaatgagggctcctttagcctccttttgggggagcctgtcaggggcaccctctagctgactgtaaaacgagggggttgcccacatcccctcccttgttctagaattctgggacagcttctgccctggggacattttcccattcttttctggttgcctcatactcccagccagctgtctcttctcctttaaggccgagcctgccatgggggtctggtggggtactgagtatcgggggaagaagaggcacctttcagcccttcagactcctgtttgcccctcctctgccaataatacagcacggggcaagggaggggctgggcgagaagagaggccctgaggcaggaagatctgctcagaaccctggtgtgggctcagccacccccatccaatgacctgactactctcccttctcctcagatcctcacagccaccgtggacaatgccaacatcctgctacagattgacaatgcccgtctggctgctgatgacttccgcaccaagtgagtcctagctgtggccttgggcagcctgggccagctggcggaggatctcagggtacccctcctgaccccaggattccttggttgcttgtggcaaggcccaggagctcagggtggggcagtcctaggagccccactccttagtccaggatgcagtgaaggcagccagttctgaaggttgctgagcttaggcagggaatagaagagaaggaggggaggcgggaggcgggaggcagagagaagtaaggaagctggtgggcgtgggatctggccctgtgatggtcccggggtcccggggctggaattcgtttccactcgaccctctcatcagcccttccaactccttagagtcctggcaaaatgaaggcaggtgagcagccaggacctggatctgcaggtccaagcagcctgggctgaagtctctgattcccacggcaggtttgagacagagcaggccctgcgcctgagtgtggaggccgacatcaatggcctgcgcagggtgctggatgagctgaccctggccagagccgacctggagatgcagattgagaacctcaaggaggagctggcctacctgaagaagaaccacgaggaggtgaggtggctggggcagaaggtcaaagatgctgaggagtgggtggcagagccctggggctgggcaatggctgaggccgtgggagagagcagagcaggtgcaccgggattagtcaccttagagggcttccctgtctgcagagccctgatccttggggtccagtgtgcagggcagactcctctttgtaccacactgcttctctgtacacaaggaacctcccaggggcctgcagaggctccctctacctaccctgcctccctcatgagggtgggggataagtaaggaaatcttgtcccatttcaaactctcaaagctgaacatctacatagaagcttggaaattagaggggaacttttgggggcataggcctaataattagattttattttggagagtccttggtctaatgggggagatagagtctgatggtggaggcaatactgagcagatgaataaaaatcatttagagggtcagatagagcagagggagaacaaaggaggggtccttgtgggaagtggggtccccttgtgggggaaggcttgggagtgagaggtcaggatgggtccagatgcgcacatccacatcccctttttccataggagatgaacgccctgcgaggccaggtgggtggtgagatcaatgtggagatggacgctgccccaggcgtggacctgagccgcatcctcaacgagatgcgtgaccagtatgagaagatggcagagaagaaccgcaaggatgccgaggattggttcttcagcaaggtggggggtgctgcaggccagagggctctcttaggggctggggctcaggggccttagcactgacagtaagcccacggccagatgtcttggaggtgcccctcctcagtaagctgcatggaccacagggtcacccactgcatcaacagacatggagctgagctcaagctgggatctggcgggtgggtggggaggtagggagctccctcagaataaaggcagagggtaaagaccttgggagtccccacgtctccctcaagaagtcaggaactagcatcaagagccaggctacatgttctggcttgttctcaagtttccggtctgtgcctcccacacgctgggattaaccataaaaagttaacatttcaaatggcatgtttctgggctttgggatgtgggaagctggtgagaaggcacactctctccacagttagatttgggaggaggcctgacttgggagagggatccaggctcacaccgccctgtcctgtgtcctgtctgcagacagaggaactgaaccgcgaggtggccaccaacagtgagctggtgcagagtggcaagagtgagatctcggagctccggcgcaccatgcaggccttggagatagagctgcagtcccagctcagcatggtaggaacagtcctgtgcatgggggagggcccagaagagggcattgaccatcctcactgacccctggtcttcctgccctcctgcagaaagcatccctggagggcaacctggcggagacagagaaccgctactgcgtgcagctgtcccagatccaggggctgattggcagcgtggaggagcagctggcccagcttcgctgcgagatggagcagcagaaccaggaatacaaaatcctgctggatgtgaagacgcggctggagcaggagattgccacctaccgccgcctgctggagggagaggatgcccagtgagtgggggcgcctggggtcagggctgggggtctcttggcaggggtggggctctcagacccacatctaatttcctctctgtttttttttttctttcagcctgactcagtacaagaaagaacgtaagtatctgcgtggcttcggccctgggggttgggtgcatgggacaggcagcccacctgcacgttgctggggcagggtccccaggagctccaggagttgatggctgtccctcagcagggagaagtgactcattagcactgaggattgatactcaggaaaagatcaaatgagagagacactgtctggtctgatgggggtggggcagggaactggtccttaccttggagatcctagtctgatggaggagacaggtcccagctctggagattgtcatctgatgggaagataggaacatggtctcatgatctttgctcttgacagcttttggatgagcaaaaacagtcctgtctctggggtctgtagcctgatgggagatagggacatggtccttgtcctccaaattccaatctgatggagaatatatgatcctagccttagggttcctagtctaatggaggagataggggcctggtttttgtcttggcgatcccagtctgatgggggagatggtagaaaatctatgtcctagagactgcagagaaatggagacggatttcatggagtctacatggctcctccctggcaggacacactggatcagaatcaaataacccatctggggaggcaagactcacacagggccaccggcagagggatgggatggaagggaggtggtggcagggacaggagggatgtgtgtgcagtgtgatgtcgaggtgccagtggaggcactcacagcacctgggggaggatgagggagagagccggctcctgtccatgagggctagggggcaagcgagggcctcctggcccctacccactttaaattgcctgcttctcctgcagcggtgaccacccgtcaggtgcgtaccattgtggaagaggtccaggatggcaaggtcatctcctcccgcgagcaggtccaccagaccacccgctgaggactcagctaccccggccggccacccaggaggcagggaggcagccgccccatctgccccacagtctccggcctctccagcctcagccccctgcttcagtcccttccccatgcttccttgcctgatgacaataaagcttgttgactcagctatgaaatgtgtccttgttctggcccctgaagtggggactagggac

SEQ ID NO: 7947 - DNA, 508 bp, Homo sapiens; identical to SEQ ID NO: 6452
  misc_feature (1)..(508): n=a,t,g or c

SEQ ID NO: 7948 - DNA, 362 bp, Homo sapiens
ctaagaggctatttattttaaggaaagttgattaatatttaaatgattaaaaaataaatcaatgttaagtattaactgcacaaaatctaaaaaaaagaccacattacatcatactacattatatagatagatttaaagcagctaactagaagcctttttaaaaatttaaagtttctgacatcattttccaccattccatcaattcttccttctcctcttctttcctttcagaaaatgactccagttcaaaatcaaccccagcagcagggctgtaagggaactgccactttctttgttattgccagatagcctgggagctgaggctgtaaggtttatagtttccgggtataagcaaatctcca

SEQ ID NO: 7949 - DNA, 446 bp, Homo sapiens; identical to SEQ ID NO: 2199
  misc_feature (1)..(446): n=a,t,g or c

SEQ ID NO: 7950 - DNA, 359 bp, Homo sapiens
  misc_feature (1)..(359): n=a,t,g or c
tttttttttttttttttttttttttttaatggggcaacgtttttatttctgtacatttacatacaaattttccccaaaggtacaacagatgcgacaccatgcagacacgcagctgtgaacgacagttcaggaactcagcgtaagttgttngctatgaacgagcaccgtcagagaattcccacccacacggtacaggaaacacagtttttatattacaacctcaaggnncagggagggaagtnttcgccgctaggacatgacacaccatactgcttttccaaaacacacgggttcatgaaaaggcgaggtgggtgccttctaggacgagggggacagctnttagttgtgggacctccccc

SEQ ID NO: 7951 - DNA, 1391 bp, Homo sapiens
ggacctgtgttacttcccttgtgaagaaacagaattatcatgaaaatttaggtggaaaccatttcgcttttttcttcaaaaataagggaagcatgtgcccaaccacccctgggaaaaagaaccttcaggggcaaaggagcgaacaggtaatttataagaaaaacagaaagtggtcttcttgactgccccagacttccttcggagttgggggaattggggacgcctggacgcgttgtttttgtgtttgtggaaaaaataaatgaaggagcatgaagcccgaggcttctgagatcctttcctgaccaaacccaagtgatttggtgtcggggaattttaatatttttccccttttgtgaggtggaacaaacacaacttgggagcagcgcagcggctcagagcctgccagccaggcgggcgaccagagcaccaatcagagcgcgcctgcgctctatatatacagcggccctgcccaggcgctgcttcatcggcgctttgccacttgtacccgagtttttgattctcaacatgtccgagactgctcctgccgctcccgctgccgcgcctcctgcggagaaggcccctgtaaagaagaaggcggccaaaaaggctgggggtacgcctcgtaaggcgtccggtcccccggtgtcagagctcatcaccaaggctgtggccgcctctaaagagcgtagcggagtttctctggctgctctgaaaaaagcgttggctgccgccggctatgatgtggagaaaaacaacagccgtatcaaacttggtctcaagagcctggtgagcaagggcactctggtgcaaacgaaaggcaccggtgcttctggctcctttaaactcaacaagaaggcagcctccggggaagccaagcccaaggttaaaaaggcgggcggaaccaaacctaagaagccagttggggcagccaagaagcccaagaaggcggctggcggcgcaactccgaagaagagcgctaagaaaacaccgaagaaagcgaagaagccggccgcggccactgtaaccaagaaagtggctaagagcccaaagaaggccaaggttgcgaagcccaagaaagctgccaaaagtgctgctaaggctgtgaagcccaaggccgctaagcccaaggttgtcaagcctaagaaggcggcgcccaagaagaaataggcgaacgcctacttctaaaacccaaaaggctcttttcagagccaccactgatctcaataaaagagctggataatttctttactatctgccttttcttgttctgccctgttacttaaggttagtcgtatgggagttactgaggtatcagacgaattgggtgacggggttggagagtggccgtggtgaggttacagcatttaaacctttattgcggcttctaggtc

SEQ ID NO: 7952 - DNA, 454 bp, Homo sapiens
tttattcaagatcaattttatttgttgtaaaaacaaacaagcgttatgttccagacagatataagtgagtagacttatgccctggtgcctccttggctcttcacaggatgcaaaaacaaatctcgccagcaggaggtggcaggctgcagaggtggctggttgctctttgagccatcttggccttgcctggcatgcacaggccccagcacagcaaaacattcagggagtaagagtgttgcacaaaggattttaccaacctcgtcacattaagcagcattcaaggatttgctgaccaccacttaagcaaattttgtgttatgctatagcaatgaacttacttgttctatttcgaaacaaaatattgggttcacacagaggcctggacaaagcttcccacttctgaactatttactgatcttcttattctcaaagaatgcaagatgaatgatgtgca

SEQ ID NO: 7953 - DNA, 342 bp, Homo sapiens
tttaggaggctgtcaataccccagaacatggtgtatgttttgttttgtttttgctgtggaaacctggatacagttatacctatcataatcataactgcattttatctttttaacctcattaggatgtcatacagatgatggtaaacttttcagtttacaagttaaagtgctgataaaagaataggggccaagttctggatcaaatttttgagtataatctgctacaaaaatgaaagattgcaaatatcataaacgtgcaaaaattagcatctcctccaaatatttcatacttatcaaagaggggaaacatagatctttctctccttacttactatcttgagg

SEQ ID NO: 7954 - DNA, 237 bp, Homo sapiens
  misc_feature (1)..(237): n=a,t,g or c
tttttttaagaatcttctgggcctctttattaagagccctctgccttnccaggggagggaagcaaatccttcagggcccccagagttcctgcaccccatatcatgggtgagnctaccagccacagagccacccgtcaccgtggagaggcttaagntgcactcagagctccccccgggcatgccgaatgtagtgttgatgcagccctgcttcctgagcaaagtcctgaccgcactctg

SEQ ID NO: 7955 - DNA, 252 bp, Homo sapiens; identical to SEQ ID NO: 7020

SEQ ID NO: 7956 - DNA, 147 bp, Homo sapiens; identical to SEQ ID NO: 7139
  misc_feature (1)..(147): n=a,t,g or c

SEQ ID NO: 7957 - DNA, 448 bp, Homo sapiens; identical to SEQ ID NO: 6406
  misc_feature (1)..(448): n=a,t,g or c

SEQ ID NO: 7958 - DNA, 190 bp, Homo sapiens
aaaaattatagctcttggattccaaattcctatgcccccgatctgcaagcctcgtgggctctggagcactcgtggcggagtgtgtcagtgtgtctgcacgcacagtgaagggtgtgaactggattctagcacctactgagaaatcaaggaaaagaaaactaaagccaaaccccaagattgcagggaagct

SEQ ID NO: 7959 - DNA, 396 bp, Homo sapiens
ttctgagtcaatctattttattgaccaaaagattcctgtggaaacaggaggtgagtgccctaagccctcactccttagcactctgcgtgctgatgtagtcctggagaagcgcctgcgcctccatccgccggctcatcttggtggccttgcctgaaaacggcctttcttccctgctcctttgccttccaggacctcagccaccctgggccccagggtctccacagacgcaggtggccctgccagtaagaagagtccaccacctttctcatcgcccacagttaagaacaggagggtctcctctgacccaatctcattggcaatgatattcatgaactctgaatcaccctccttcctgtgtaatatgaccacacctccccagtctggactgttcctgag

SEQ ID NO: 7960 - DNA, 355 bp, Homo sapiens
  misc_feature (1)..(355): n=a,t,g or c
ccactggaggtggtctttattactgtcgccatgatgtgaaaagaggaagacagcacccattcccacgcctcctagacactgtgcaccaacaactgtctgctggggttagcacggagctgtccccacccccagggtcagagcacccacaggtncgaagctggcccaggagacccccacgntgctgacgctgtttgccttgtgtctgcacaggcctctactaaactntcccacacaattagtgtcttaaatatatgtacacgtatatattttgtcccaactgtgtcagttataaaatgaaaactgaccacttctccttacgttatcttcacaggtaggctntgcaggaaggncaaca

SEQ ID NO: 7961 - DNA, 194 bp, Homo sapiens
  misc_feature (1)..(194): n=a,t,g or c
ggaaaatgaacagtaaatttattgaaactggtttaggggcaggggatgggaggacagctgggggttttccaaagagaactgagggaggagccagcgcccggccaggngggagcgggtgcctggccacagaccctatctcaggcccagctncttctttccctgnctnctacttgaggaccacgtccagattccgg

SEQ ID NO: 7962 - DNA, 1960 bp, Homo sapiens
gagcagctgcaccatcccggcgttcgcgtgtgccgccgctttcctcctccatctcttttcctccgcctccgccggcgcgatgggcgaaccgctgacggacagcgagaagcggaagcagatcagcgtgcgcggcctggcggggctaggcgacgtggccgaggtgcggaagagcttcaaccggcacttgcacttcacgctggtcaaggaccgcaatgtggccacgccccgcgactacttcttcgcgctggcgcacacggtgcgcgaccacctcgtgggccgctggatccgcacgcagcagcactactacgagcgcgaccccaagcgaatttattatctttccctggaattctacatgggtcgcacgctgcagaacacgatggtgaacctgggccttcagaatgcctgcgatgaagccatctatcagttggggttagacttggaggaactcgaggagatagaagaagatgctggccttgggaatggaggcctggggaggctggcagcgtgtttccttgactcaatggctaccttgggcctggcagcatacggctatggaatccgctatgaatttgggatttttaaccagaagattgtcaatggctggcaggtagaggaggccgatgactggctgcgctacggcaacccctgggagaaagcgcggcctgagtatatgcttcccgtgcacttctacggacgcgtggagcacacccccgacggcgtgaagtggctggacacacaggtggtgctggccatgccctacgacaccccagtgcccggctacaagaacaacaccgtcaacaccatgcggctgtggtccgcaagggctcccaacgacttcaagctgcaggacttcaacgtgggagactacatcgaggcggtcctggaccggaacttggctgagaacatctccagggtcctgtatccaaatgataacttctttgaggggaaggagctgcggctgaagcaggagtacttcgtggtgggcgccacgctccaggacatcatccgccgcttcaagtcgtccaagttcggctgccgggaccctgtgagaacctgtttcgagacgttcccagacaaggtggccatccagctgaacgacacccaccccgccctctccatccctgagctcatgcggatcctggtggacgtggagaaggtggactgggacaaggcctgggaaatcacgaagaagacctgtgcatacaccaaccacactgtgctgcctgaggccttggagcgctggcccgtgtccatgtttgagaagctgctgccgcggcacctggagataatctatgccatcaaccagcggcacctggaccacgtggccgcgctgtttcccggcgatgtggaccgcctgcgcaggatgtctgtgatcgaggagggggactgcaagcggatcaacatggcccacctgtgtgtgattgggtcccatgctgtcaatggtgtggcgaggatccactcggagatcgtgaaacagtcggtctttaaggatttttatgaactggagccagagaagttccagaataagaccaatggcatcaccccccgccggtggctgctgctgtgcaacccggggctggccgataccatcgtggagaaaattggggaggagttcctgactgacctgagccagctgaagaagctgctgccgctggtcagtgacgaggtgttcatcagggacgtggccaaggtcaaacaggagaacaagctcaagttctcggccttcctggagaaggagtacaaggtgaagatcaacccctcctccatgttcgatgtgcatgtgaagaggatccacgagtacaagcggcagctgctcaactgcctgcacgtcgtcaccctgtacaatcgaatcaagagagacccggccaaggcttttgtgcccaggactgttatgattgggggcaaggcagcgcccggttaccacatggccaagctgatcatcaagttggtcacctccatc

SEQ ID NO: 7963 - DNA, 1786 bp, Homo sapiens
tgtccttggctgagaaagtgatcccggccgctgatctgtcgcagcagatctccactgcaggcaccgaggcctcaggcacaggcaacatgaagttcatgctcaacggggccctcaccatcggcaccatggacggcgccaacgtggagatggccgaggaggccggggccgagaacctcttcatcttcggcctgcgggtggaggatgtcgaggccttggaccggaaagggtacaatgccagggagtactacgaccacctgcccgagctgaagcaggccgtggaccagatcagcagtggctttttttctcccaaggagccagactgcttcaaggacatcgtgaacatgctgatgcaccatgacaggttcaaggtgtttgcagactatgaagcctacatgcagtgccaggcacaggtggaccagctgtaccggaaccccaaggagtggaccaagaaggtcatcaggaacatcgcctgctcgggcaagttctccagtgaccggaccatcacggagtatgcacgggagatctggggtgtggagccctccgacctgcagcttcagcacctgccccacccagagtgggagtcaggtggagccacctgctgggctcccccagaactttgcacacatcttgctatgtattagccgatggctttagtgttgagcctctggattctggggtctgcggcagtggccatagtgaagcctgggaatgagtgttactgcagcatctggctgccagccacagggaagggccaagccccatgtagccccagtcatcctgcccagccctgcctcctggccatgccgggaggggtcggatcctctaggcatcgcttcacagccccctgccccctgccctctgtcctggctctgcacctggtatatgggtcatggaccagatggggctttccctttgtagccatccaatgggcattgtgtgggtgcttggaacccgggatgactgagggggacactggagtgggtgcttgtgtctgctgtctcagaggccttggtcaggatgaagttggctgacacagcttagcttggttttgcttattcaaaagagaaaataactacacatggaaatgaaactagtgaagccttttcttgttttagaatgaaaattgtacttggtcacttttgtgcttgaggaggcccattttctagcctggcaggggcaggtcctgtgccctcccgcttgactcctgctgtgtcctgaggtgcatttcctgtttgttacacacaagggccaggctccattctccctccctttccaccagtgccacagcctcgtctggaaaaaggaccaggggtcccggaggaacccatttgtgctctgcttggacagcaggcctggcactgggaggtggggtgagcccctcacagccttgcccctccccaaggctcgaacctgcctcccattgcccaagagagaggggcagggaacaggctactgtccttccctgtggaattgccgagaaatctagcaccttgcatgctggatctgggctgcggggaggctctttttctccctggcctccagtgcccaccaggaggatctgcgcacggtgcacagcccaccagagcactacagccttttattgagtggggcaagtgctgggctgtggtcgtgccctgacagcatcttccccaggcagcggctctgtggaggaggccatactcccctagttggccactggggccaccaccctgaccaccactgtgcccctcattgttactgccttgtgagataaaaactgattaaacctttgtggctttggttggtt

SEQ ID NO: 7964 - DNA, 548 bp, Homo sapiens
tttttttttcaaggatgaacattttattggaatataggcacctggcagagtaaatacatggttacaaagtgttttaagtttatttgctttatatagtgaccgggaaagtcaatccacagtgtcgattttttttcttgaagttgcagactttagaaggcaaaccctcaaacccgtctctttatggtaaagtgtgaaggcacatgttgccaactgttgcaccgactgatactattattaagtcaatgatgtccttcccttcttcacatcaaaattgctatgaatcacatatcacttaaccttattataatgaacgaaaatcacttttgtcttggggaattgtgaaaccttttgaaatcactagctctgacatagaagattaccagacttgagaatttttataataaaatatgtaagggcagaaagcttttggacaagttggaatcttacctggtagtctccaaatccttttttttttttttaagaaaggttccatgtgtaatgcaagcactatggctctgcttaagccacaggggaaaattgcagcccgt

SEQ ID NO: 7965 - DNA, 473 bp, Homo sapiens
  misc_feature (1)..(473): n=a,t,g or c
acctataaatatattttattcatacttttaaatattttacaattcaaataaaaaccttatatgtagacaatctgggctaaatttccatgtatgttttgaaaaataatgttagcatgaatagattcatatttaaatatgattttaaatactcttaatagaggagacataagaaatatttacataaaagctaagtagcatgatacagctcatggttattttcctcataggaaaacaattacttgattttttttttttgcataggattaagactgagtatcttttctacattcttttaactttctaaggggcacttctcaaaacacagaccaggtagcaaatctccactggcnctaaggntctcaccaccacttttctcacaccnaagcaataggtaggnatccaggncccaccttctgagggnccggaaggaatgggttccggaaaataatggnttttaaaanattaccattaag

SEQ ID NO: 7966 - DNA, 722 bp, Homo sapiens
  misc_feature (1)..(722): n=a,t,g or c
tgatttaaaaaagatttatttacttgttgaatatttattagtagtagtagtaataaatataaccccgaagccacaaataaccttaggattctctcagctttaatggcagtagagtccagcttcttaatcttttgcacaaaatacactcaaggaggagctatccataagactaatagaagacttttgtctccctgacccagctcctctaatttcatatgggaaacacctaacagccataaagtgatgatctgggagtcctcattagagatgggctggacatgtcagaaagctgaagaaagaaatcaacctatttcgtgaaccttaccatctaaaattgttagtctgtgtcttctaaataaacagagacctttttctcttgggttgagccnttcccccttccntttggattttatctccaccacttttatggaggctccttacacgttacctcatttattctcacaacatgcctgtaaggtagggaggggcagggactgtccccgttttacagaggaggaagttgaggcacacagaggtcaagtgacttgcccaaggtcacagacggcggccaagctggaaatgggccccggagcagacccttggttcacctggggacggggggggggtccccctgcagcaagcgccaccaagaggatgtctcggatgccaganaggcgcatacacagcatagagcagcccctcaggtactggcttggcttcgg

SEQ ID NO: 7967 - DNA, 426 bp, Homo sapiens
ttttttttgtctttattcatttatttatttattcattcattttgtgcccttctgggaatgaaccaggactatttgaatggaaagagaaaaaaaaagctgtcatagtttaaaaattggcatatgttctcttccagattaaattcccttggaccttttaatttatgctagaacaagcacttatcttttcttttttttattactaagcccaacacagtgcgtggcatgcagtaactgttcaaataatgtttgtttaattgacgggttttaagctcgataacttagctaagccctttgcacagtctaagcctaatttggaatgctttcagtcttacccaggccaataaaattttcttgcctcatctgaatttcctgcaaatgtgattaattaataagaatcatcaagattaattaataagaaattgatag

SEQ ID NO: 7968 - DNA, 392 bp, Homo sapiens
ttttctatttaatagtgtctgacatttattaaaaataaggaaaaaacctttgtacaggtagtgtattagagcagggaagggagcagggcttactgtgttgaacaaaaggcacccatcagagagacagctgcaaattcagaagaaaacaggattctaggcaaaactaactggtccacaggagaaaatgagagattcgatttggttgccaggcacacttaagccctggcagctatgtggcaggaacacaagaggtctctggggatggggaggaaatgggtctcgctgaaggtgacaggctccttgggggacggccagctgtctggatcactgtccaggggctgtgtccagctcggatacctccgaggtgagtccacatcactaggagccacagt

SEQ ID NO: 7969 - DNA, 287 bp, Homo sapiens; identical to SEQ ID NO: 3600

SEQ ID NO: 7970 - DNA, 352 bp, Homo sapiens
  misc_feature (1)..(352): n=a,t,g or c
cgagatttattttttgtttgatgaatctgacaccagtcagggagaggagaatgttgtgacccagcagaaaaatatggccccagaggaggggcggcttcttcctgcctgggtgggtttggtgctggggttgatttgttattattttttaatttgttgctggaaggttttcttttgtttacttttataaatctctccccgggcttgcgagcttcccctccgctccnagcctccccttcccctgcccccaaatttcatttttaaaaagcgagcttgctcgcnagcgtgtgtcccccaagctcccanagggntctaataaaataaaggagcacctgtaaaacaggtagctttgact

SEQ ID NO: 7971 - DNA, 298 bp, Homo sapiens
ttttttttttgagaagccgtgacaagtcttaatgtgccatttcaattcaaaggaggggagggaggaaatgttcttgtttgttcgctcatcaatatgatgaggtctcgtgtcccaaaccacattcaggcagttcccgagtctgcttttgaacaggacgtgcgggtccagactgtggccggcccagtggggtgtgtggttcccggccccgcacctggacgctgccggtggggtgggggcgggtgggcgggtggatagacggacaaagcagcagcctggtgtgcagccgggctcccggccg

SEQ ID NO: 7972 - DNA, 250 bp, Homo sapiens
  misc_feature (1)..(250): n=a,t,g or c
tttttttttttttgaagaaagaaatctttattaataatcttaataatactgttagtttgaatggtcacaccttggaagcatacagaatggtaagaaaggangcccggggctcggctgcagtcctggggatctgagtgagtcggggngttgagctgctgcaaaaaaagggtccggaacagcagaggggacagggggctctntacagaggacaaagccggacngtgtgacgtggggctatntacaacgggat

SEQ ID NO: 7973 - DNA, 813 bp, Homo sapiens
ttctcgggaggcagtctgggtccttccaccatggcacctaagaaagcaaagaagagagccgggggcgccaactccaacgtgttctccatgttcgaacagacccaaatccaggaatttaaggaggccttcactatcatggaccagaacagggatggcttcattgacaagaacgatctgagagacacctttgctgcccttgggcgagtgaacgtgaaaaatgaagaaattgatgaaatgatcaaggaggctccgggtccaattaactttactgtgttcctctcaatgtttggggagaaacttaagggagcggaccctgaggaaaccattctcaacgcattcaaagtgtttgaccctgaaggcaaaggggtgctgaaggctgattacgttcgggaaatgctgaccacgcaggcggagaggttttccaaggaggaggttgaccagatgttcgccgccttcccccctgacgtgactggaaacttggactacaagaacctggtgcacatcatcacccacggagaagagaaggactaggagggggctcgctcgtggaccctgggctcgtctttgcagagtggtccctgccctcatctctctcccccgagtaccgcctctgtccctaccttgtctgttagccatgtggctgccccatttatccacctccatcttctttgcagcctgggtggctatgggtacttcgtggccgcacatcctacagttggaaatccatccagaggccatgttccaataaacaggaggtcgtgtatttggtcacgacatttctctgaaaaaaaaaaaaaaaaaaaaaaaaaaaaa

SEQ ID NO: 7974 - DNA, 421 bp, Homo sapiens
  misc_feature (1)..(421): n=a,t,g or c
ttttgagggtaatgcaacttcttatttattaatatataataacaacaattatacagctcatatctgcaactgttaggtctttgttatgtcttggtcactttgtctggactggccgtgaccttcagctccagggtctgggctaggaagacgttccagtgaccttcgtgggggccagcgagcagtcggaagtgctgtgcctctttctggaagtcttgcttcctgactttcttgatctgagtcaagtggaagattctggctgtgtggccttggcagggtacttcacctctctgagcctcagtttcctcatcttttaccagcttccagaggtagatctccaccaagtccgaggcctcngtgttcccaggggcaaagcgacgnaggttngtctngggctttgggggataccggatgttttggacga

SEQ ID NO: 7975 - DNA, 410 bp, Homo sapiens
  misc_feature (1)..(410): n=a,t,g or c
gaagggtgagaaatttattcagatttcttcataattccccccaaaagctccaaccacgttgccagtccttgggtgctgcagttggtcggggagaggggctgtgtggaggtcaccttctggtagacggagacccgcttttcagactctgtggcgcanagngcgggccaggaacatttgggccactattgctcttagccctgccgcgcctgactttctctcctctactttccttccgaccgtagggaacaagtgtggggatccgctttgggctccaaggccctgcccgcactggcagcaccaagcgggtgtagaatgacttggaaggagcagggaaggaagatgggtgtcaactgtcccggccagtggttgcntgcatgtgtgtgtgaacagggaaaaggccaccctctccc

SEQ ID NO: 7976 - DNA, 366 bp, Homo sapiens
acagaattccccaaactttaatgctgtgctctgaaaagggaggctggaggttgtggtgggtcacagtgttgctgacacctctggcctccagccctgcatccctaggcaccatgtgaccaggcagtgagaaggacggggcctcactcccatgccagactgctcctcgggctgagcaggacctgaagctctcagggcttccaccaaagcccagcaaacttgggggaggcctgagggggcatcagcagtccttaaaggcctgagcttgcaacactcaggcaggactcggctgagggcctctgtggttgccaccatggggtaggaggtaaagagagaccctggttccagcctgggaaccagtgggtgccc

SEQ ID NO: 7977 - DNA, 325 bp, Homo sapiens; identical to SEQ ID NO: 4694

SEQ ID NO: 7978 - DNA, 258 bp, Homo sapiens
tttttgactggtagtaatttattgttacacacacacacacacacacacacacacacacacacacacacactaggttaacatcaaccaccgcaccatccaggcactccccagccaccacgtgtgggcacaaagacacacacacccctcttggtaggcagatttccctgtctgctcccctcttcctgtgggagaggcatgccttctgggcagtttaaaggtgggaagttacaggggcctaaaaaggtaaaagagcagcag

SEQ ID NO: 7979 - DNA, 462 bp, Homo sapiens
  misc_feature (1)..(462): n=a,t,g or c
tttcagcccaagtctctttattggaaccgggccccgctggcctcggctcaggcatttccatttccattagtgggaccaacccactgggtgatttgagtgttgagccgctggttggtccagtcctgccggatgtcatcaaggtggcagtcaaagtccacaaggtgctggtgggcccgatcttccagtagagctcccaccatctgccgtgactcttcccagtccctccacatcactaagttcttatccttagggacccagcggagaccttggttctccaggacgatgaccgggggcacacgaggctgaggcaccagtttcttgattatccaacataataagtactgcatcagggaagaattctgcaattcgcccagcaattttcaaggccaggggccaagggctctgatcgttcacagctgcattggcatggtagtaaccagccaccaccagaccgggctgtgn

SEQ ID NO: 7980 - DNA, 415 bp, Homo sapiens
ttttttaaaatccatacaaacatttattctgtccctgcctggaggtgagggggaagggagtccggagagccccgcagaggaggacggggctctagcgggaagacagtgtccggaggccggtgggctccctctagacggcagaccctggggctaacgaggggccagctgggttctcagaggtcacggactctaggaggtggggcggcgagtggtggaagccggcgcccccgaagaccggccagcccctggagcacagaggcgggtccagcccacactgcgctgagtgaggccctggccccactggggtctgtcccacccccaccccgcaggagggaaggcagcaggcccgctcttcccggtgtgaaagatgctgtgcaagtcatcaggtttaaattaaaaataataaaaataacaa

SEQ ID NO: 7981 - DNA, 510 bp, Homo sapiens; identical to SEQ ID NO: 3266
  misc_feature (1)..(510): n=a,t,g or c

SEQ ID NO: 7982 - DNA, 507 bp, Homo sapiens; identical to SEQ ID NO: 1890
  misc_feature (1)..(507): n=a,t,g or c

SEQ ID NO: 7983 - DNA, 372 bp, Homo sapiens; identical to SEQ ID NO: 5668
  misc_feature (1)..(372): n=a,t,g or c

SEQ ID NO: 7984 - DNA, 374 bp, Homo sapiens
  misc_feature (1)..(374): n=a,t,g or c
acaccagcaagtttattgagtaattaaggtgacagccatagaactttgcaaatgcgtttccataaaagttctgagttacttgactatgaaaagtgaattttcattttaaccaaccccctcctccaatactaccagaaagcatgagattctgaagaaatcttcacaaatctactcttaattatgggtagcaatgttccagtctcaattagggttctgctggggttctgggagttggggagtgaagtgggctcttgagtgggctnccagcacttgtggggaggttctcatcccaaacactggggagggccttgaggtcccccactttgtgacccgccaggactttaaaggatggattccaaacataaatgnccatg

SEQ ID NO: 7985 - DNA, 302 bp, Homo sapiens; identical to SEQ ID NO: 4475

SEQ ID NO: 7986 - DNA, 486 bp, Homo sapiens
  misc_feature (1)..(486): n=a,t,g or c
atnanaaacaaatagtcacagcatctttatttataacagcaaaacactggaaacaacccaaatgtccatcaacagtgaatggatacacaaaccctggtgcatccatttaaaagaatactaactcagtaacaaaanttaaaactatttagacacctaacaacttggatagatcttaagggtaatttgctgagtgaacaaagccctatctcaaagcttgcgtnaccttacggnttccattttaatagcattcttgaaataacaaanttaggggtaatggggatcagtgggctaccatggggtcatattggggagggacagtgtgaggtattaangagggtagccaagagggaggccggggcgtgggtgggctcatgcctggttaatccccngcactttnggggagggccgaggcngggtgggaccccccggggngtccgaggagtttcagggcccgcctgngggaancacagttgaaccccgtcttct

SEQ ID NO: 7987 - DNA, 305 bp, Homo sapiens
  misc_feature (1)..(305): n=a,t,g or c
tttagagaaatgtttttattaagcaacatagtttacaaatggaggtaatttcccactgcatagataccatgtgttttttaagttgaggttcttcatgtgtattttcccactttcattaatctcttctttttatcttacatacttttnttcttagattttcccagccaataacttcttgttttaaatgtttcanaanaagtatttgggagtattcatatganaatgatggttgttttcataattgtgnccttctttgtaggatccaaatcngggattaaaatgaattttcncagaaacttctcngt

SEQ ID NO: 7988 - DNA, 281 bp, Homo sapiens
tttttttttttttggcctgtatctcataattatttttatttagaggaatttggtagtggcggggttggggtgggaggtggtgtgtggacggtgtgaattgacagaaacaatttccctacaccaaaatacaggtatgttttcattctctatgcccctaaacaccctccctgcagctatgcaacgagcaattcacgggaagaggcttctttacatagacccctgtttttggtgttttgatttacttttgtgtatagagttgatctgtccctcttcccattggt

SEQ ID NO: 7989 - DNA, 372 bp, Homo sapiens
  misc_feature (1)..(372): n=a,t,g or c
tttttttttttttttgaaggcacacggctttttaatagcagcaagtcaggtgcatctgcctcgaggggctaccaagccatcataccattgtggcaaagggggcatgaggatgaggagaaagcaccaatntgagggcatcctcggtgtccacaggtgagcataaggcaggaggggaagcttccaacacatctggatggcgacacccctggncatggcagacataagatgtgagccccttggtgacacaatcagaggctctttgagaggagggggaggcaaggttggtagtggtncttcagggcactctngccatccaaatgccacatgntttggtccttntagctgcaattggataggaggcatgttccatct

SEQ ID NO: 7990 - DNA, 112 bp, Homo sapiens
  misc_feature (1)..(112): n=a,t,g or c
ttttnctttattgatatttttgtctcactctctgtcacccaggctggcatgcagtgacacgatcacagctgattgcaagcttcgatcttctgagctcaagtgatcctcctgc

SEQ ID NO: 7991 - DNA, 445 bp, Homo sapiens
  misc_feature (1)..(445): n=a,t,g or c
ttttttttttttatgtttgcagaaaggcaggaaactttattgaataatcttttctttggggtagagaagttgagaaaccaaagcgtatccaggtcagagaggagagagatccgacagaacgagaagagcacagagggcccaccatcaggagagagtcaggacagggggtcctgagagcagagggactgagccttgggtccagcagcccctcctctctcctgcagggaactgccggctctctcctcctctgggtgctgaagacagagggaggggacgccaggcaagatttaaggcctacggacatcagaagtgcggcgaccagaaggcattagaggtggtggtaacagaggcantaagaattcttggtaacaaaaggttgctacggggggttnacgcttcntggctgaaggaaggggaaaccaatcatntttgggggtcctggncc

SEQ ID NO: 7992 - DNA, 324 bp, Homo sapiens; identical to SEQ ID NO: 1998
  misc_feature (1)..(324): n=a,t,g or c

SEQ ID NO: 7993 - DNA, 290 bp, Homo sapiens; identical to SEQ ID NO: 2824

SEQ ID NO: 7994 - DNA, 291 bp, Homo sapiens; identical to SEQ ID NO: 5319
  misc_feature (1)..(291): n=a,t,g or c

SEQ ID NO: 7995 - DNA, 273 bp, Homo sapiens; identical to SEQ ID NO: 2114

SEQ ID NO: 7996 - DNA, 323 bp, Homo sapiens; identical to SEQ ID NO: 2973

SEQ ID NO: 7997 - DNA, 1709 bp, Homo sapiens
ggtacctcctgccagcacctcttgggtttgctgagaactcacgggctccagctacctggccatgaccaccacatttctgcaaacttcttcctccacctttgggggtggctcaacccgagggggttccctcctggctgggggaggtggctttggtggggggagtctctctgggggaggtggaagccgaagtatctcagcttcttctgctaggtttgtctcttcagggtcaggaggaggatatgggggtggcatgagggtctgtggctttggtggaggggctggtagtgttttcggtggaggctttggagggggcgttggtgggggttttggtggtggctttggtggtggcgatggtggtctcctctctggcaatgagaaaattaccatgcagaacctcaatgaccgcctggcctcctacctggacaaggtacgtgccctggaggaggccaatgctgacctggaggtgaagatccatgactggtaccagaagcagaccccagccagcccagaatgcgactacagccaatacttcaagaccattgaagagctccgggacaagatcatggccaccaccatcgacaactcccgggtcatcctggagatcgacaatgccaggctggctgcggacgacttcaggctcaagtatgagaatgagctggccctgcgccagggcgttgaggctgacatcaacggcttgcgccgagtcctggatgagctgaccctggccaggactgacctggagatgcagatcgagggcctgaatgaggagctagcctacctgaagaagaaccacgaagaggagatgaaggagttcagcagccagctggccggccaggtcaatgtggagatggacgcagcaccgggtgtggacctgacccgtgtgctggcagagatgagggagcagtacgaggccatggcggagaagaaccgccgggatgtcgaggcctggttcttcagcaagactgaggagctgaacaaagaggtggcctccaacacagaaatgatccagaccagcaagacggagatcacagacctgagacgcacgatgcaggagctggagatcgagctgcagtcccagctcagcatgaaagctgggctggagaactcactggccgagacagagtgccgctatgccacgcagctgcagcagatccaggggctcattggtggcctggaggcccagctgagtgagctccgatgcgagatggaggctcagaaccaggagtacaagatgctgcttgacataaagacacggctggagcaggagatcgctacttaccgcagcctgctcgagggccaggatgccaagatggctggcattggcatcagggaagcctcttcaggaggtggtggtagcagcagcaatttccacatcaatgtagaagagtcagtggatggacaggtggtttcttcccacaagagagaaatctaagtgtctattgcaggagaaacgtcccttgccactccccactctcatcaggccaagtggaggactggccagagggcctgcacatgcaaactccagtccctgccttcagagagctgaaaagggtccctcggtcttttatttcagggctttgcatgcgctctattccccctctgcctctccccaccttctttggagcaaggagatgcagctgtattgtgtaacaagctcatttgtacagtgtctgttcatgtaataaagaattacttttccttttgcaaat

SEQ ID NO: 7998 - DNA, 482 bp, Homo sapiens
  misc_feature (1)..(482): n=a,t,g or c
ttaaagagacttagcacatttattcactcacagaggtgaatgaagggctcagggtttgaactcgatgacactgatggcgatccgggctgcccgctgtaaggcttcggccacttgaggcttttcgtaagtctccacctccatggcacggaaagtgggcacgtgcgtctgcagggccttgcggcctncgggggctnctgccagcatggtaagggccttggtggcattcaggcgcgctatggtcatgggggagtgcagcagctccaggagcaggccgatggcttgtgcctccagggccgcatacttcccttcagtgatcactgtgggcgaacatcaggggcanccggcagcgttagactttcacatgctccactggggtctttcagcagatgggaccagggattggggatgacgtcaaaattgacacaccttttttttgccctttngagatantgttgaacattnagggagcgaacgggcgnctt

SEQ ID NO: 7999 - DNA, 274 bp, Homo sapiens
  misc_feature (1)..(274): n=a,t,g or c
ggttttctacctttaattggggatanaaaaggcacctctcccagtacaagaggatcaaccangaggtganccccagtgctgtggtgcccggncagaaggaacagaggaaggatggaggncaaggcagcggtgaccccagtgctgtggtgcccggccagaaggaacagaggaaggatggagggcaaggcagcggaggggcagtggggcccagcatcccctgaagcctcacctgcagcctggggctgattgagatctcgcccactgcgcgcagang

SEQ ID NO: 8000 - DNA, 264 bp, Homo sapiens
tttttttttttttttttttttttttttttttttttttttttttttttttccacccatggtggctttattcagtcacgtccccacgcccacggctccctccaccaggcagacagaggggaggccaccccactgcaaagggtcccagccagtgggcaccaacctcaggaagacgtggtccccacctggagcttccctcggctgccctggcccttgagcccgtcctgaggatttgtgctttgactctgacagggagcagcaggaagc

SEQ ID NO: 8001 - DNA, 870 bp, Homo sapiens
cagagtttcgccatggcccggggccccaagaagcacttaaagcgtgttgcagcgccgaagcattggatgcttgacaaactaacgggtgtatttgcacctcgtccatcgacaggtccccacaagctgagggaatgtcttcctctgatcgtcttcctcaggaatagactcaagtatgcgttgactggagatgaggtaaagaagatatgtatgcaacgtttcatcaaaattgatggcaaggttcgagtggatgtcacataccctgctggattcatggatgtcatcagcatcgagaagacaggtgaacatttccgcctggtctatgacaccaagggccgttttgctgttcaccgcatcacagtggaagaggcaaagtacaagttgtgcaaagtgaggaagattactgtgggagtgaagggaatccctcacctggtgactcatgatgctcgaaccatccgctacccagatcctgtcatcaaggtgaacgatactgtgcagattgatttagggactggcaagataatcaactttatcaaatttgatacaggcaatttgtgtatggtgattggtggagccaacctcggtcgtgttggtgtgatcaccaacagggaaagacatcctggttcttttgatgtggtgcatgtgaaggatgccaatggcaacagctttgccacgaggctttccaacatttttgtcattggcaatggcaataaaccttggatttccctgcccaggggaaagggcattcgacttactgttgctgaagagagagataagaggctggccaccaaacagagcagtggctaaattgcagtagcagcatatctttttttctttgcacaaataaacagtgaattctcgttaaaaaaaaaa

SEQ ID NO: 8002 - DNA, 395 bp, Homo sapiens
ttttttttttcaaagtcaattaaattttatttcaaccaagaatataaaataaatgcaatgtaatttattttagttttaacagtcatttcaagaaggaagtcaggtcaactcaaaagcaggaaaccctcgctccaaagcagtagctcgtcctgcactccatggagcaggcctcgctggggtgcagcggctctgagcacaaacctcgcagtggagcacgaaaagctacagtcatctctataaccatataaagggggatgcgtgcagaaaatgactgaaaaaagagacaagaacaggtacacttcacaaataggaattataggaatatacaaactaggcagtttagaaaggatatactacataacatatataaaaagtactttaaattgttgttaaaa

SEQ ID NO: 8003 - DNA, 348 bp, Homo sapiens
ccacagagaaaaattagattgaattaacttttattactacttgtttaacacagatttacttgtcttagacaagtaagaatttatagaatctatgctctattgcactatatagaaactagaaatgcagttatactgatgtagtgcagtttgtgggaaatcaggaatggtgttctccagaatacatgaagattctcattgattgttgcaaggaatcacgaaagagatctttggtccaaagaaaacgtcttttgggcagcagagcaattcgctgaagttgcagtaacagatcatctcacatcccttcccatcccagaaatgatcctgggacattgacatcaatctgtgtca

SEQ ID NO: 8004 - DNA, 436 bp, Homo sapiens
  misc_feature (1)..(436): n=a,t,g or c
tttaaaaaaaagtgtttatttcctttattttaagattcagtaggatagccaaattcatagagaataaaattacatgaaagagttacaagctcactgttttaaagacttgacatttttcatttagttttaattaacagtaataagtcacctcctgtttttcaatgttcaccaaaaaaagaaacatagaatagggggaaaacatgcttatatagccaaggtacagatccagatgatgtaacctttttagtattcgcatgacttgaaaactgggcagatcaatagataatcgaagtgctttatctgaagggagagggtaaagacagtgtgaccaggtttgttttcagggctgccgaatgagcctcacctaacagtgtccatgggtaattcgctnaccttnacaagatgggaagaagtgagtgctctgatgtcttctgct

SEQ ID NO: 8005 - DNA, 464 bp, Homo sapiens
  misc_feature (1)..(464): n=a,t,g or c
tgcataggattaagactgagtatcttttctacattcttttaactttctaaggggcacttctcaaaacacagaccaggtagcaaatctccactgctctaaggttctcaccaccactttctcacacctagcaatagtagaattcagtcctacttctgaggccagaagaatggttcagaaaaataatgattataaaaaataacaattaagaaaaataatcacatagaggtaaaataaagcaactaaacatcatagttttgcatttttagaaaagcatttaaacatttagaattatagtaaatatattacatttattctaaaacttcaaaattattctgtttttgtagtactgaaaagaagatagtgccatttggaaacaacagatggcatccttttatacattttcacaagtttgggntttcntattttttaaaggggccccatttatcnggtaacagtggggaatt

SEQ ID NO: 8006 - DNA, 332 bp, Homo sapiens
  misc_feature (1)..(332): n=a,t,g or c
gcaagttataaaatgtttattgatatacattttgtcttttataaaacttccgttggccacattgggccactgtgcaccacagtncagtccccaggtggccagggcggacagtcgtccactttcgggtgggggctggagcaagaggtgtccaggagctgcccagtgggtcctcatggcctgcgggatacctcaagtgctcccggagcagcctaggactggctcgtcccggagtcacaaaaggcaggtcaactacccaaggcggccaaagnctntcctgtctccagagccttgacataaccagaaatccccccatcaaagtcaccaaatgactc

SEQ ID NO: 8007 - DNA, 2653 bp, Homo sapiens
ctcaaaaggggccggatttccttctcctggaggcagatgttgcctctctctctcgctcggattggttcagtgcactctagaaacactgctgtggtggagaaactggaccccaggtctggagcgaattccagcctgcagggctgataagcgaggcattagtgagattgagagagactttaccccgccgtggtggttggagggcgcgcagtagagcagcagcacaggcgcgggtcccgggaggccggctctgctcgcgccgagatgtggaatctccttcacgaaaccgactcggctgtggccaccgcgcgccgcccgcgctggctgtgcgctggggcgctggtgctggcgggtggcttctttctcctcggcttcctcttcgggtggtttataaaatcctccaatgaagctactaacattactccaaagcataatatgaaagcatttttggatgaattgaaagctgagaacatcaagaagttcttatataattttacacagataccacatttagcaggaacagaacaaaactttcagcttgcaaagcaaattcaatcccagtggaaagaatttggcctggattctgttgagctagcacattatgatgtcctgttgtcctacccaaataagactcatcccaactacatctcaataattaatgaagatggaaatgagattttcaacacatcattatttgaaccacctcctccaggatatgaaaatgtttcggatattgtaccacctttcagtgctttctctcctcaaggaatgccagagggcgatctagtgtatgttaactatgcacgaactgaagacttctttaaattggaacgggacatgaaaatcaattgctctgggaaaattgtaattgccagatatgggaaagttttcagaggaaataaggttaaaaatgcccagctggcaggggccaaaggagtcattctctactccgaccctgctgactactttgctcctggggtgaagtcctatccagatggttggaatcttcctggaggtggtgtccagcgtggaaatatcctaaatctgaatggtgcaggagaccctctcacaccaggttacccagcaaatgaatatgcttataggcgtggaattgcagaggctgttggtcttccaagtattcctgttcatccaattggatactatgatgcacagaagctcctagaaaaaatgggtggctcagcaccaccagatagcagctggagaggaagtctcaaagtgccctacaatgttggacctggctttactggaaacttttctacacaaaaagtcaagatgcacatccactctaccaatgaagtgacaagaatttacaatgtgataggtactctcagaggagcagtggaaccagacagatatgtcattctgggaggtcaccgggactcatgggtgtttggtggtattgaccctcagagtggagcagctgttgttcatgaaattgtgaggagctttggaacactgaaaaaggaagggtggagacctagaagaacaattttgtttgcaagctgggatgcagaagaatttggtcttcttggttctactgagtgggcagaggagaattcaagactccttcaagagcgtggcgtggcttatattaatgctgactcatctatagaaggaaactacactctgagagttgattgtacaccgctgatgtacagcttggtacacaacctaacaaaagagctgaaaagccctgatgaaggctttgaaggcaaatctctttatgaaagttggactaaaaaaagtccttccccagagttcagtggcatgcccaggataagcaaattgggatctggaaatgattttgaggtgttcttccaacgacttggaattgcttcaggcagagcacggtatactaaaaattgggaaacaaacaaattcagcggctatccactgtatcacagtgtctatgaaacatatgagttggtggaaaagttttatgatccaatgtttaaatatcacctcactgtggcccaggttcgaggagggatggtgtttgagctagccaattccatagtgctcccttttgattgtcgagattatgctgtagttttaagaaagtatgctgacaaaatctacagtatttctatgaaacatccacaggaaatgaagacatacagtgtatcatttgattcacttttttctgcagtaaagaattttacagaaattgcttccaagttcagtgagagactccaggactttgacaaaagcaacccaatagtattaagaatgatgaatgatcaactcatgtttctggaaagagcatttattgatccattagggttaccagacaggcctttttataggcatgtcatctatgctccaagcagccacaacaagtatgcaggggagtcattcccaggaatttatgatgctctgtttgatattgaaagcaaagtggacccttccaaggcctggggagaagtgaagagacagatttatgttgcagccttcacagtgcaggcagctgcagagactttgagtgaagtagcctaagaggattctttagagaatccgtattgaatttgtgtggtatgtcactcagaaagaatcgtaatgggtatattgataaattttaaaattggtatatttgaaataaagttgaatattatatataaaaaaaaaaaaaaaaaaa

SEQ ID NO: 8008 - DNA, 391 bp, Homo sapiens; identical to SEQ ID NO: 4924

SEQ ID NO: 8009 - DNA, 381 bp, Homo sapiens; identical to SEQ ID NO: 1760
  misc_feature (1)..(381): n=a,t,g or c

SEQ ID NO: 8010 - DNA, 484 bp, Homo sapiens
  misc_feature (1)..(484): n=a,t,g or c
gtcattttggttttgttttattttgcatttcatatattatccagtttcacattctcacaggatcagcaatgacaacagccgcctcatctcccaagtctgaaatggccagacggtcacagctgcggctgacagtaaagcactgatatgctcaaaacaaaaaacattgcacagtgtttcnttcatttcattttcttaaacaaatgccagacacaaaggcgtactgctgaagaatggaaacccttttcttcttcatgcctcaaactaaacattaaacttatctgacagggcgaacgaggtcgctttaataattaatggtacgcacatgaaaaatcctttatgatgcataaatattttgttacacagggtacaaaaatacttctcacgttttggttggtttcgaggttttggaagaatgaggagcagcggcgggcggggtgcgctgtggagaggtgacagaccgggcagagagggctttcttacggct

SEQ ID NO: 8011 - DNA, 430 bp, Homo sapiens
ttttttttcacatttaattgaacaaatatttattaagcacctactttgtgccagacattgtgctaggcccctcactgtgtgctgttcccacagcacaatcatctgctcagaaattaaaaccaagaaaaggaacactgttgcaaccgtacaaactgggggggcggggggcagggggcagtagcgtggatgcaggcaactccgggccagaaaatgcacccaccagaagcttgttttccatctctcagaaagtttccactaaacagttgttttaaagcctctcgatgttgacagagaggaatgttgttctctctgtgccccccggcgtgcgtgtctggtggacattcaaatactctgaatgctatttgataaaaggagcctgatggcttggtgtaaagaatatcaatatttggattacaaaatgcgtgttttt

SEQ ID NO: 8012 - DNA, 354 bp, Homo sapiens
tttttttttttctgttcaaaaaaggttttatccaaaaaagttaatcaagacaagcaacagatactgcaaagcattatatacagcaccatagtccaggggccaaagaaatcaggaggggctgggcagtagaggaattccatatattaatgaatgtgagattaagtatagagtgaagacattaacacacaatttctaatttctgttaggcagaatgctcccctaccctgatgccacagcctttcacgtttcctaaaccctagtaacctctgatctccatctgcctcatcaacacgtcaccaccctttgctcttcttccaatttagtcacatgttgggctgaatttatttccactcc

SEQ ID NO: 8013 - DNA, 437 bp, Homo sapiens; identical to SEQ ID NO: 2955
  misc_feature (1)..(437): n=a,t,g or c

SEQ ID NO: 8014 - DNA, 410 bp, Homo sapiens
  misc_feature (1)..(410): n=a,t,g or c
tgtgtggttccaactgttttatactgaaatatgtctgagctgatccaaaaaagcgttgggttgggggagaaggaaatgatggaagtggggtgatctcagagctccatgttagcaactctgggagtntgggccggtccatctgtctgtctgcccaccctggcaggacaatcaggcctaggaggtctggaggagctcgccgagctgggcgnaggaggcaggccagtcccatgctggaggggaccccacggccccttctacagggcaggagagtcctcagctgaagggcttcaccagcttcatgggcagcatagttcgggaaggcntagatgaagatggccagggaacagcagcaggatgaagaggatgatgaagaggatgatggcccaacggaaacgccgccacaggatgaa

SEQ ID NO: 8015 - DNA, 386 bp, Homo sapiens
atctgcaatgaacttggtttattgttagagttggaggtggctccgttacagcagctgggaactatagcagggaagcgtggggaggagcagaacacagcagcacggggagggtggagctaggaagaacacaaggtgggctcattttggtttcccagtcgtttggcagagaaggcaagcccacatgactaccagcttctgggtttctcagtctggcagtagtctggcagggctgctcactggcttgcttggggcgaggtcctctcctggggtggtattttcagcccgttttcatttcactctgtaggagttaagctgtggctcagcttctccctttttccttcctccatctcattttccccaagtcctctggcctgggtttccaccct

SEQ ID NO: 8016 - DNA, 299 bp, Homo sapiens; identical to SEQ ID NO: 3098
  misc_feature (1)..(299): n=a,t,g or c

SEQ ID NO: 8017 - DNA, 1420 bp, Homo sapiens
cacctttcctgcctgtgtgactaacctaattttgctagttccataaatacacgattagtttagtaacagccatcacaatgtaccatgtacattcatggtgagagctaaagatcgacacagacttctaggagctttgttcatactgattacttaatccaattgtatagattgaatatttgagtggaaggaatttacactctgtttaaatgatgggattctatcgagatagcactcatgatcatgacctttttggtagtattcttaaacaaaattctacagagactaaatgttagcgatgatcctccattttcaattttaaccaattctgtcccctttctcaaaaccctgagccctgtgcatgctttctcagtcttgtggtgggactggatacaatgactaacttcccctcctcccctctttaaacaccattttccatggagttcaaaaaaattttttttcttaacgttacatatcatagtgaatggtttccccagtgtatatgaatgttttaagtgtctccaatagcttatgcagtctaggagctttccaatactcatttaattaagatttaatcatttgctaatggaaatcttaccacctttcattttccctctgttaccaaatttcagctcttaggagctgctctacaattctgaatttgcttttcttgcctctctttagtcacctgtcacaggaggttcctgctcagtaatgatattgtgagttaggataataactttttttttttgtgcttcagatttagaagaaaagatcctgtttccatttgaaaggaactgtaagcttttatcttttaaccaactgaacaatacaccaaaagcagcctagggatgagcatttctttgaaagcaattaggttattcacctggtattaaaactatttactgttaaaaaatctgtgacttcatgaagttgatttttaaaggcagcatcaaaaactgaaaaggaagggaaaaaataggcagcttctctgcacttgtttggagctccccaaaacaggagccatggagaagtggcatcaagaccgggctgccctttcgagaacaccctgtggcagttcagagacacgcttttcctacactgcatgcagcccctctttccagcactggaaagaagtggtcttgagcccagctgagaagcacttcacactcctctctcttgttctgaatggtgtttgtgtcagtctgcagctgtgtatggtattatgtcttataatcctgcatcacttctatcctatccagtcatatctaatgtagaaaattagtttccagtgaaagtaatatgtagtgcttttatgatatttgtgtgcaatatcccctcttccattgaggatatttgatgtaaaggaaaaaaaaaaactcagttccacaataaaatacaaaagtggcaaaagttaaaaaaa

SEQ ID NO: 8018 - DNA, 1277 bp, Homo sapiens
aagctgcttccctggagacgggcggggaggccaaacttcctgctgaagctctgtggcctcttttggggtgggggcgggggtccaggcagaaagaaactgtctgctgctcaagacccacaggacgcccggaagactaaatgatcactgcccccagtgaatatggtgaagaagctggtgatggcccagaagcggggagagacacgagccctttgcctgggtgtaaccatggtggtgtgtgccgtcatcacctactacatcctggtcacgactgtgctgcccctctaccagaaaagcgtgtggacccaggaatccaagtgccacctgattgagaccaacatcagggaccaggaggagctgaagggcaagaaggtgccccagtacccatgcctgtgggtcaacgtgtcagctgccggcaggtgggctgtgctgtaccacacggaggacactcgggaccagaaccagcagtgctcctacatcccaggcagcgtggacaattaccagacggcccgggccgacgtggagaaggtcagagccaaattccaagagcagcaggtcttctactgcttctccgcacctcgggggaacgaaaccagcgtcctattccagcgcctctacgggccccaggccctcctcttctccctcttctggcccaccttcctgctgaccggtggcctcctcattatcgccatggtgaagagcaaccagtacctgtccatcctggcggcccagaagtagagccatccatccatgccataccacttgtcagggcacaggggactggctgggcccccagggctgctccccacttgcagcacaatgccttctccacctgccctcccactcttccagtccaatccacgctgtcttctgttgcaggactaacctttgagaaatccttttgtgaagtcattgcctgctcaagaatgtacagtggctccccaatgccttggaggccataaggccagccagttctagctctctattacctgtccccactcaactgactcatacctgtttccggctgcatcactatgtgccccacagagaacgatgatcgtcacctctgtgcctgagttctccctgttgtctcaaagcggtacccatcctcccccagaagctgtccccagcgagcctcccttctttgtttgaattctctaataagagcaacagcagctcccatttctagaacacatttacagtattactattttctaggatataaagtgccatatatatttttaattccaatattaataaatgtatgccaaacaacaata

SEQ ID NO: 8019 - DNA, 304 bp, Homo sapiens
  misc_feature (1)..(304): n=a,t,g or c
gatgtacaaacgtagctgtattggggagggggtggggaggggggatgggggagggacgggtcagtcttccttcaggctcccaaacactgcggctggcacgntctgctgctccagccgaacctcgttgggctccaggtccatctcgtcctcgtcctcgtcctcgcccagctggatctcctcggggttgacctgctgtgccagctctgccagctcctcccgggaggcgtcactcctcacgaacaggatcttgctctgggcgcgcaagggctggtcacgctccgcctcagccgccagctgctctgcc

SEQ ID NO: 8020 - DNA, 398 bp, Homo sapiens; identical to SEQ ID NO: 6177
  misc_feature (1)..(398): n=a,t,g or c

SEQ ID NO: 8021 - DNA, 406 bp, Homo sapiens
ttttaggaaaaaacggcacagtgatttaatggtaagtcactataaacatgaagggaaagactgccatccaaggaagcgcagaaaaggacacccctcaggtcctggatggaggaggatgacccccaatactggatggagaaggatgcccccagtcctagatggagaaggatgcccccctcagtcctggatggagacgtcatgagtaactgtcggtaggaaacatcatgttcttcattctgcccttgctccttgggctccaacaggaaaaaccagaaattctgtggatataaaacatggaaacattcattctttaaagaaaaaggctgcagagacaagaacagcgaaaggatggtattgaatacatgcaaatggataaaatatgaatgattatgttctcatgttcaac

SEQ ID NO: 8022 - DNA, 401 bp, Homo sapiens; identical to SEQ ID NO: 2588

SEQ ID NO: 8023 - DNA, 245 bp, Homo sapiens
tttttttttttctggtccgggttagctttattggagcctcctagcaggccaggtgtttcaggcaccagtagtgctgcaggcacgggggcctgtggtgtggccagctgcaggtgatctcggtggtggactccgaagtgtactccagagaggtcccggaatggcaggggaccagctcgggcactgaggcgctgctggcaggctgtttcgacgattccttctggcgctgtccgctggtcttgggggct

SEQ ID NO: 8024 - DNA, 294 bp, Homo sapiens; identical to SEQ ID NO: 1728
  misc_feature (1)..(294): n=a,t,g or c

SEQ ID NO: 8025 - DNA, 401 bp, Homo sapiens; identical to SEQ ID NO: 6086

SEQ ID NO: 8026 - DNA, 365 bp, Homo sapiens
  misc_feature (1)..(365): n=a,t,g or c
aacatattgatacattttattacaaagaaactcacacataaatgatttgtcctatttatcataataggccaccaatcactaggagccaagcttcatcagcttaagtcctaggtagcatgtctcaatgcatacatatttatatcgttattaaccgtgtttcttttctttttttcgagacagagtgtccaggctggaggtgatctcggcttaccgcaacctccgcctccgggttcaagtgattctgccgcctcagccttcctgggtagctgggattacaggcacgcatcaccacgcccggctacttttgtatttttagtagagatagggtttctccgtgttggtcaggctggtctcgaactcccaan

SEQ ID NO: 8027 - DNA, 348 bp, Homo sapiens
  misc_feature (1)..(348): n=a,t,g or c
ttacacacatcagactgggggaagaccattgacatagctgagcaccaggtagggtntcctgggtattcgggcatgagagcagcaggggcctcctgacgcgggcaggagaaacatggcacccaccaggaggaggaagaggaggaagaggataaggaggaaggtcagaggctgcctgggatgcaggatcgggggcccctgggattcccctccagcctcacatcctgggagatgaggagatgcttgcctcttcttgtcctgaggcttccggagcagggagtttctttgggtgacgtgctaagcntttctnggtggcccaggccaganttccagcatntcctnttcgggagt

SEQ ID NO: 8028 - DNA, 305 bp, Homo sapiens; identical to SEQ ID NO: 222
  misc_feature (1)..(305): n=a,t,g or c

SEQ ID NO: 8029 - DNA, 550 bp, Homo sapiens
  misc_feature (1)..(550): n=a,t,g or c
catcgtttttgtttttatttttcccctttcaacctggttttcggctctggaagctgttcctgtgcacagttctatttcctacagttctgagaaagcggttccatcgcagatgaccaaaggctggacccctctggctataacgtagaccttccagtgggtggtgtcgacatagccgatatcccctggctctattggcatggccacagactgacaatgtcttcggcactggaagggagggatgagctgcaacatggcctcaccgctgccaatgataaataggtcanggcatcttatgcatcttactccccacaacaggttctgggtgaagaaaggagcacttgtttaaagaggcatcttttnggaaatgncaggtgagtgaaaacaggaaaaagctcacgtaacatttgtnatctgttcanaggtctcctccatggataaggnaatgggaaccaccgctcaggaaagcagcgccaccacttgtcgaaaaaacctttcaggagaangccttctgtcgnctcaggggtactggcacanaaaaatgctgaatctc

SEQ ID NO: 8030 - DNA, 374 bp, Homo sapiens; identical to SEQ ID NO: 561
  misc_feature (1)..(374): n=a,t,g or c

SEQ ID NO: 8031 - DNA, 399 bp, Homo sapiens
  misc_feature (1)..(399): n=a,t,g or c
aanattaaaaaaantttcacattttaatatgcttaganggagtttttaaagangtagaantgntttcgttggcctctgactttcagtgatgaaantgcaaccatgcagtcccccctttgcagaagggcagttcttcccaggctttctggaagcaggggcttccgaggagtctccacccacctcacaggaacactcactntgngccctgcacaggacagcaggtttcacantctccantagggttgggcaggggcagcccttaaaacttggaagagggtcgntggaaggtgctgcgggaggacacagggcgtggaagcaggctnttcggggtcgggccgccgtgcaggggggtntccctgaggtcctttcccaaanggggantgctngccggtgcccgac

SEQ ID NO: 8032 - DNA, 470 bp, Homo sapiens; identical to SEQ ID NO: 6578
  misc_feature (1)..(470): n=a,t,g or c

SEQ ID NO: 8033 - DNA, 395 bp, Homo sapiens
atgaagggcatttaatgtcagagagaaaccgtacacctggggcagagatgatgagcacgccgggcccgccagcctgacccgttgcagcgtcctgtggtttgtgaggcctccctcggtggaggagtgacagcagcagctcaagcttcccctccccgggggtgggggaagacagtataacgtccacgcagcctggtcatgcaccctggcttctgcagcccaggcgcaaacattcagtttagggctttcctgacatgtcaggtcaaatggccccctttcctcttcaggtaggagctagtgaaccgtggaggatgaagaattctcgctggaaaggcaggcctgaagtccgggaggtgcagatctctctgtggtcactgggccagagatgaccttggact

SEQ ID NO: 8034 - DNA, 368 bp, Homo sapiens
tttttttttttttttttcaaggggattttaatgaaattttattaaggagatgagaagcagggagtctgtgttgaaaattcaataaagggcttgttttccatctcagcctggataatctatgttatctctgagtaaagggggtaacaattctaacaacctggcttccttagaagtttccattctcatatagtcaccgaaggcagcagcactcaggcgtttgctgccgtgcctgccctttggtttctgggacggctcgggtcccgtagcgccggcacagctgagattgccaagccgggaagagaccttgctccaggtgtagctgcgttttccccagatcacctgtccttttcccctccgacaaggaagct

SEQ ID NO: 8035 - DNA, 237 bp, Homo sapiens
atgtctttacagctttaatctagcaggccagagatgtggccagtggggcagccagagaggagggctactgccagctgctgacggaacctcctccctccccccaccccagcccagaggggacaaacagtagggccccagccttcctggctggcatcttgggagcagagggactatttgaaaacaggcactgtgacccaggctgtcatctccctcccttgcccccagtaaaaatagccc

SEQ ID NO: 8036 - DNA, 307 bp, Homo sapiens; identical to SEQ ID NO: 6391

SEQ ID NO: 8037 - DNA, 3130 bp, Homo sapiens; identical to SEQ ID NO: 6047

SEQ ID NO: 8038 - DNA, 409 bp, Homo sapiens; identical to SEQ ID NO: 6203

SEQ ID NO: 8039 - DNA, 242 bp, Homo sapiens
ggtgctggttaggttttattttaacaggatgttttctcttatttttcaaaatatcagttatatcaatattagaagtgtaaacaggtacaaaatatacagtacatagaaacaattttcttaactagtctatcgcctaataaaagtatgcatgagggggctgaatgaatgggcactgccaggtccctccgtctgcaggggaaacaagaggaccagtggctgcttcaacaaaacaggaatggata

SEQ ID NO: 8040 - DNA, 11990 bp, Homo sapiens; identical to SEQ ID NO: 161

SEQ ID NO: 8041 - DNA, 418 bp, Homo sapiens
  misc_feature (1)..(418): n=a,t,g or c
ttttttttttttgaagaaagaaatctttattaataatcttaataatactnttagtttgaatggtcacacccttggaagcatacagaatggtaagaaaggaagcccgggntcggctgcagtcctggggatctgagtgagtcggggggttgagctgctgcaaaaaaagggtccggaacagcagaggggacagggggctctttacagaggacaaagccggcnggngcgtggggctatntacaacgggantagaaaaggaganttccatttcaatagctgatgctgantagaaagtgaggtntatttttaaatttttgacacttcatnagacagtnggagccacgttngggagcctgtattttttgctncttccctacttcagtgctcccntgccntcgcccgggggnttcctccctngccc

SEQ ID NO: 8042 - DNA, 1162 bp, Homo sapiens
ccactccggagtcctctgcccgcttcccgacctcgagggtctcctctgacgcgcagcgtcgattccccttccctcctcggtcccctgccccgcccctctcactgcgcggagccggtcgccggggggccgcaggggaggaggcggagaggcggggccctcctccccaccctctcactgccaaggggttggacccggccgcggcggctataaaagggccggcgccctggtcgtgccgcagtgcctcccgccccgtcccggcctcgcgcacctgctcaggccatgatgagcttcggcggcgcggacgcgctgctgggcgccccgttcgcgccgctgcatggcggcggcagcctccactacgcgctagcccgaaagggtggcgcaggcgggacgcgctccgccgctggctcctccagcggcttccactcgtggacacggacgtccgtgagctccgtgtccgcctcgcccagccgcttccgtggcgcaggcgccgcctcaagcaccgactcgctggacacgctgagcaacgggccggagggctgcatggtggcggtggccacctcacgcagtgagaaggagcagctgcaggcgctgaacgaccgcttcgccgggtacatcgacaaggtgcggcagctggaggcgcacaaccgcagcctggagggcgaggctgcggcgctgcggcagcagcaggcgggccgctccgctatgggcgagctgtacgagcgcgaggtccgcgagatgcgcggcgcggtgctgcgcctgggcgcggcgcgcggtcagctacgcctggagcaggagcacctgctcgaggacatcgcgcacgtgcgccagcgcctagacgacgaggcccggcagcgagaggaggccgaggcggcggcccgcgcgctggcgcgcttcgcgcaggaggccgaggcggcgcgcgtggacctgcagaagaaggcgcaggcgctgcaggaggagtgcggctacctgcggcgccaccaccaggaagaggtgggcgagctgctcggccagatccagggctccggcgccgcgcaggcgcagatgcaggccgagacgcgcgacgccctgaagtgcgacgtgacgtcggcgctgcgcgagattcgcgcgcagcttgaaggccacgcggtgcagagcacgctgcagtccgaggagtggttccgag

SEQ ID NO: 8043 - DNA, 328 bp, Homo sapiens
ggttacaagattctttattttgtaaactatacataaacagtaaaaaagaaaatgcattatactttattacgtaaagtcaacattaaattttgtattgagtgtgtataaattaaatggaaataattaatcaattttgctttcaatgaattgtatactgggaaaccagtttacccactgttgaaattaaagataccaatacgtaacattcaacaggtttttccatttttattatgggcacaaaaccattggtatgatatagttaaaagtgatggtgtgccaaaatgtctacacaattaattaacatgctaacttaaatacagcggttaaa

SEQ ID NO: 8044 - DNA, 233 bp, Homo sapiens; identical to SEQ ID NO: 4058
  misc_feature (1)..(233): n=a,t,g or c

SEQ ID NO: 8045 - DNA, 2709 bp, Homo sapiens
gggtcctgtcccatccatcctgacctgttccatctcagccccaggactcagtactgcggttgccaacactgctgccaggcatgatggatgggccacgttccgatgtgggccgttggggtggcaaccccttgcagccccctaccacgccatctccagagccagagccagagccagacggacgctctcgcagaggaggaggccgttccttctgggctcgctgctgtggctgctgttcatgccgaaatgcggcagatgacgactggggacctgaaccctctgactccaggggtcgagggtccagctctggcactcgaagacctggctcccggggctcagactcccgccggcctgtatcccggggcagcggtgtcaatgcagctggagatggcaccatccgagagggcatgctagtagtgaacggtgtggacttgctgagctcgcgctcggaccagaaccgccgagagcaccacacagacgagtatgagtacgacgagctgatagtgcgccgcgggcagcctttccatatgctcctcctcctgtcccggacctatgaatcctctgatcgcatcacccttgagttactcatcggaaacaaccccgaggtgggcaagggcacgcacgtgatcatcccagtgggcaaggggggcagtggaggctggaaagcccaggtggtcaaggccagtgggcagaatctgaacctgcgggtccacacttcccccaacgccatcatcggcaagtttcagttcacagtccgcacacaatcagacgctggggagttccagttgccctttgacccccgcaatgagatctacatcctcttcaacccctggtgcccagaggacattgtgtacgtggaccatgaggattggcggcaggagtatgttcttaatgagtctgggagaatttactacgggaccgaagcacagattggtgagcggacctggaactacggccagtttgaccacggggtgctggatgcctgcttatacatcctggaccggcgggggatgccatatggaggccgtggagacccagtcaatgtctcccgggtcatctctgccatggtgaactccctggatgacaatggagtcctgattgggaactggtctggtgattactcccgaggcaccaacccatcagcgtgggtgggcagcgtggagatcctgcttagctacctacgcacgggatattccgtcccctatggccagtgctgggtctttgctggagtgaccaccacagtgctgcgctgcctgggtctggccacccgtactgtcaccaacttcaactccgcccacgacacagacacatcccttaccatggacatctacttcgacgagaacatgaagcccctggagcacctgaaccatgattctgtctggaacttccatgtgtggaacgactgctggatgaagaggccggatctgccctcgggctttgatgggtggcaggtggtggatgccacaccccaagagactagcagtggcatcttctgctgcggcccctgctctgtggagtccatcaagaatggcctggtctacatgaagtacgacacgcctttcatttttgctgaggtgaatagtgacaaggtgtactggcagcggcaggatgatggcagcttcaagattgtttatgtggaggagaaggccatcggcacactcattgtcacaaaggccatcagctccaacatgcgggaggacatcacctacctctataagcacccagaaggctcagacgcagagcggaaggcagtagagacagcagcagcccacggcagcaaacccaatgtgtatgccaaccggggctcagcggaggatgtggccatgcaggtggaggcacaggacgcggtgatggggcaggatctgatggtctctgtgatgctgatcaatcacagcagcagccgccgcacagtgaaactgcacctctacctctcagtcactttctatactggtgtcagtggtaccatcttcaaggagaccaagaaggaagtggagctggcaccaggggcctcggaccgtgtgaccatgccagtggcctacaaggaataccggccccatcttgtggaccagggggccatgctgctcaatgtctcaggccacgtcaaggagagcgggcaggtgctggccaagcagcacaccttccgtctgcgcaccccagacctctccctcacgttactgggagcagcagtggttggccaggagtgtgaagtacagattgtcttcaagaacccccttcccgtcaccctcaccaatgtcgtcttccggctcgaaggctctgggttacagaggcccaagatcctcaacgttggggacattggaggcaatgaaacagtgacactgcgccagtcgtttgtgcctgtgcgaccaggcccccgccagctcattgccagcttggacagcccacagctctcccaggtgcacggtgtcatccaggtggatgtggccccagcccctggggatgggggcttcttctcagacgctggaggtgacagtcacttaggagagaccatccctatggcatctcgaggtggagcttagccctgtgccaggagcaatgggactggagtcagatgagcaaggacattgccccaagataggggcacactacagagcagctccccaggagctcaggtggggagtccagggctcccggagagggagtcagtcttcacttgcactgggggaacagatgctaataaactgttttttaatg

SEQ ID NO: 8046 - DNA, 2529 bp, Homo sapiens
gcatcctttttgggctgctcacagcccccagcctctatggtgaagacatacttgctagcagcgtcaccaacttgctgccaagagatcagtgctgcaaggcaaggttatttctaactgagcagagcctgccaggaagaaagcgtttgcaccccacaccactgtgcaggtgtgaccggtgagctcacagctgccccccaggcatgcccagcccacttaatcattcacagctcgacagctctctcgcccagcccagttctggaagggataaaaagggggcatcaccgttcctgggtaacagagccaccttctgcgtcctgctgagctctgttctctccagcacctcccaacccactagtgcctggttctcttgctccaccaggaacaagccaccatgtctcgccagtcaagtgtgtccttccggagcgggggcagtcgtagcttcagcaccgcctctgccatcaccccgtctgtctcccgcaccagcttcacctccgtgtcccggtccgggggtggcggtggtggtggcttcggcagggtcagccttgcgggtgcttgtggagtgggtggctatggcagccggagcctctacaacctggggggctccaagaggatatccatcagcactagaggaggcagcttcaggaaccggtttggtgctggtgctggaggcggctatggctttggaggtggtgccggtagtggatttggtttcggcggtggagctggtggtggctttgggctcggtggcggagctggctttggaggtggcttcggtggccctggctttcctgtctgccctcctggaggtatccaagaggtcactgtcaaccagagtctcctgactcccctcaacctgcaaatcgaccccagcatccagagggtgaggaccgaggagcgcgagcagatcaagaccctcaacaataagtttgcctccttcatcgacaaggtgcggttcctggagcagcagaacaaggttctggacaccaagtggaccctgctgcaggagcagggcaccaagactgtgaggcagaacctggagccgttgttcgagcagtacatcaacaacctcaggaggcagctggacagcatcgtgggggaacggggccgcctggactcagagctgagaaacatgcaggacctggtggaagacttcaagaacaagtatgaggatgaaatcaacaagcgtaccactgctgagaatgagtttgtgatgctgaagaaggatgtagatgctgcctacatgaacaaggtggagctggaggccaaggttgatgcactgatggatgagattaacttcatgaagatgttctttgatgcggagctgtcccagatgcagacgcatgtctctgacacctcagtggtcctctccatggacaacaaccgcaacctggacctggatagcatcatcgctgaggtcaaggcccagtatgaggagattgccaaccgcagccggacagaagccgagtcctggtatcagaccaagtatgaggagctgcagcagacagctggccggcatggcgatgacctccgcaacaccaagcatgagatcacagagatgaaccggatgatccagaggctgagagccgagattgacaatgtcaagaaacagtgcgccaatctgcagaacgccattgcggatgccgagcagcgtggggagctggccctcaaggatgccaggaacaagctggccgagctggaggaggccctgcagaaggccaagcaggacatggcccggctgctgcgtgagtaccaggagctcatgaacaccaagctggccctggacgtggagatcgccacttaccgcaagctgctggagggcgaggaatgcagactcagtggagaaggagttggaccagtcaacatctctgttgtcacaagcagtgtttcctctggatatggcagtggcagtggctatggcggtggcctcggtggaggtcttggcggcggcctcggtggaggtcttgccggaggtagcagtggaagctactactccagcagcagtgggggtgtcggcctaggtggtgggctcagtgtggggggctctggcttcagtgcaagcagtggccgagggctgggggtgggctttggcagtggcgggggtagcagctccagcgtcaaatttgtctccaccacctcctcctcccggaagagcttcaagagctaagaacctgctgcaagtcactgccttccaagtgcagcaacccagcccatggagattgcctcttctaggcagttgctcaagccatgttttatccttttctggagagtagtctagaccaagccaattgcagaaccacattctttggttcccaggagagccccattcccagcccctggtctcccgtgccgcagttctatattctgcttcaaatcagccttcaggtttcccacagcatggcccctgctgacacgagaacccaaagttttcccaaatctaaatcatcaaaacagaatccccaccccaatcccaaattttgttttggttctaactacctccagaatgtgttcaataaaatgcttttataatat

SEQ ID NO: 8047 - DNA, 486 bp, Homo sapiens; identical to SEQ ID NO: 6
  misc_feature (1)..(486): n=a,t,g or c

SEQ ID NO: 8048 - DNA, 423 bp, Homo sapiens
ttttttgaaattttagatttctttatgttttaacaaattaacaacaatgataagaggacattagcagcttttcttgggtctctttgttaacaataactcgatcctgcagccataacaggggatgtggccaagttttagctggcagaccagtaagccaatattttacacaatggatgacatttctgaaagcagaggcagagacagacccaaagtcacacatgtagtccaacaaacaagtttctgccatttttaattgtatttagagcaacaaaagattccaagattacaaaaagagaacagaacactagcgcttggagctggtcctgctgcccagtggaggccaagtgccaccgtgagaaataagccccatctaaagagatttcaagcaaaattgtttcttttaagaaaatctttgtgtgatgc

SEQ ID NO: 8049 - DNA, 213 bp, Homo sapiens
aggtctctgtgaggggaagcagcaggtgagggagaagggagacacaagggggagacgtggggaggcagggccaggggaaggtgacatatagacatggagtgggtcaaggaagacacatgcattcacggacctcagggccccttggcagggacaaacagatggactgactaggatgaggggaacaggacggacgtggatgcctcactcaaggcc

SEQ ID NO: 8050 - DNA, 436 bp, Homo sapiens
ttttccttgaataatcattttattaacaaatacaaacttgaaatgttggtgataaaatatatcaatattgaacaaaaatgtgtgtaaacagtaattctacaactgggaacatatctcagttttgttaattttggtgacgtcttcccaaccatgtctaatcttcagtatcttcttcctcaagcatggcaggaatagtatgcttttaaatatcaggacaacaattggaaggaaaacagctatcataaaagttggaggtgtataccatacaaattgttttatatctatccacttattccaggcaaaaatcaatgcgtgtattgtgcccagtagaagggaaacaattcctagcttgctctgcaaaagaaaaacaaaattggtgaagattggttcaataagagtttatcccatcctacctcatctggatatgctctgttgc

SEQ ID NO: 8051 - DNA, 337 bp, Homo sapiens
  misc_feature (1)..(337): n=a,t,g or c
tatgaaaggtttattccnagngctagaccccaancttcttgggctctaagcacaattaaactgggngggngggngagggtaggcctattcagangcaaggccagcaatggggctccccattatccccacccctttggncccagtccccttntctgcaangggcacgcatagaggagagacaaagggtnttagacgcaacatcattggcccaggggagtccgagaagagctgccattggctgacagggcattttcaggctctgtcattggtcagggagcacaccccagcctgaagngtgatgccattggccaggggagtggttttgtcanagccgttg

SEQ ID NO: 8052 - DNA, 254 bp, Homo sapiens; identical to SEQ ID NO: 4520
  misc_feature (1)..(254): n=a,t,g or c

SEQ ID NO: 8053 - DNA, 286 bp, Homo sapiens; identical to SEQ ID NO: 3074
  misc_feature (1)..(286): n=a,t,g or c

SEQ ID NO: 8054 - DNA, 319 bp, Homo sapiens; identical to SEQ ID NO: 2900

SEQ ID NO: 8055 - DNA, 205 bp, Homo sapiens
caggagaagcctgtttattaggcaggagaagcagcagggcagccaggctcccctcccagccaccagctggccaaatgtcctcccttaactcaggggtacccaaggctccatggccatgtgaccagaggcgtgtaccctcaagaggcggcccctcagccctgggcagcccagccactgggtctcgcccttcaggggcctgcgcccc

SEQ ID NO: 8056 - DNA, 380 bp, Homo sapiens; identical to SEQ ID NO: 1688
  misc_feature (1)..(380): n=a,t,g or c

SEQ ID NO: 8057 - DNA, 279 bp, Homo sapiens
  misc_feature (1)..(279): n=a,t,g or c
gtgattcaaggttatagctttactgcaactcaggacagtgagcccaagccaggtgttggctggcgccagaacaaggctcaaatgcggacttggacacacttcgaaggagggctgctctgccctgctgttcgggcgtggggggtggggggcgggggcactgagctgggcattctgtcctcctccctggatgtgcagacatgggccatggttnctgacgnacttcacatgtgaacctgggccttctgtcctcctccctggatgtgcagacatgggaccatg

SEQ ID NO: 8058 - DNA, 452 bp, Homo sapiens
ttttttgagggcaggtaaatgtattcagagcacatggcgagtaagaggcaaatcttctgccagcaagtccaggatttttttcaccagaggacattgcttggtccccagggctcaggaccctgtgttttgtctcactcccacccacagagctcctgtatccaggcatcaactccaactcccactcctggaggccgaggcaggaggatcacttgagcccaggagttcgagaccagcctgggccacatagtgagaccttgtctccacacaaaaattttaaaaatagctgggcttggtggtggcatgtgcctgtagtcctagctactcgagaggctgacgttggaggatcactttgagcccaggaggtggaggctgcagtgagcagtcatcactgtactccagcctggtgacagagcgagaccctatcaccgccccccgccccaccaaaaaaaaat

SEQ ID NO: 8059 - DNA, 206 bp, Homo sapiens
  misc_feature (1)..(206): n=a,t,g or c
tttttttttttttttttttttttttttttgacacaaacccactttattcagcattgagccagcccacacgctgggaggtcaaactcacagacatcgcaccaagggccggggactcagaagggctgaaaggcttcatctnggaaatgggcaccgctcacaagcccggctatccccaaatctcaacaactgtctgcatctatgtcccc

SEQ ID NO: 8060 - DNA, 224 bp, Homo sapiens
attcaagatcaattttatttgttgtaaaaacaaacatgggttatgttccagacaaacagatataagtgagtagacttatgccctggtgcctccttggctcttcacaggatgcaaaaacaaatcctgccagcaggaggtggcagattgcagaggtggctggttgctctttcagccagcttggccttgtctggcatgcacaggtcccagcacagcaaaacattcag

SEQ ID NO: 8061 - DNA, 424 bp, Homo sapiens; identical to SEQ ID NO: 2011
  misc_feature (1)..(424): n=a,t,g or c

SEQ ID NO: 8062 - DNA, 204 bp, Homo sapiens
  misc_feature (1)..(204): n=a,t,g or c
ttttttttattgacatttcaataaaaatttattgaaatttcagtgatgttttaaagagagggggaaaaatacagaaaaccaaagaactcatcaacaactataacacaaantntacctncatgattttgtcttnaaaccatctctcagcacctgacttttganctgtgaatatatctctataggcaggcaccanttcaaaacacc

SEQ ID NO: 8063 - DNA, 551 bp, Homo sapiens
accccatccgctggctctcacccctcggagacgctcgcccgacagcatagtacttgccgcccagccacgcccgcgcgccagccaccatgctaggtaacaagcgactggggctgtccggactgaccctcgccctgtccctgctcgtgtgcctgggtgcgctggccgaggcgtacccctccaagccggacaacccgggcgaggacgcaccagcggaggacatggccagatactactcggcgctgcgacactacatcaacctcatcaccaggcagagatatggaaaacgatccagcccagagacactgatttcagacctcttgatgagagaaagcacagaaaatgttcccagaactcggcttgaagaccctgcaatgtggtgatgggaaatgagacttgctctctggccttttcctattttcagcccatatttcatcgtgtaaaacgagaatccacccatcctaccaatgcatgcagccactgtgctgaattctgcaatgttttcctttgtcatcattgtatatatgtgtgtttaaataaagtatcatgcattc

SEQ ID NO: 8064 - DNA, 501 bp, Homo sapiens
  misc_feature (1)..(501): n=a,t,g or c
cactntttnnacgcttgctaagactttattaacgccccggaganggngnttanggaaagcaacaggagggagaccccgcgacgnaaagagtngctcagagctctgcagacacaaagatgaaaagcttggccacaaaggagctgacggtgccgtgggagagagatccatcttgacggtcaggagcaagtccctgggctcggggacaggcttggtgagggccaccaccccactntggggcntcaccttccgggtgggtgaaaaagccctcctcattgccgccggtgatggccagctgcatgctgtccccggggaaaacttngnagggggcccatgcgggaaaaccaccgcgggcgctttnggatgttgggtggggggaaagagaggtggtagttaggttatttcttcagaggcagcttttggagcacttcccgatttttcattgggcaaggcaagcgttcacagcgggttngctttcggngccgnggttagttttttcagggc

SEQ ID NO: 8065 - DNA, 1195 bp, Homo sapiens; identical to SEQ ID NO: 6604

SEQ ID NO: 8066 - DNA, 306 bp, Homo sapiens
tttacaaacaaagtgtgggtatatttggcaggtttgaggcaagcagaaaggagggtttgggtactctataaaaaaagatctgaaattcaaacatctgataaggccacaatgaagagatttccagcagtgggtgttgcaggatgctggcacccaaatcgccgcacgttgcaaaggtgctatgcaaggtgaggaggcaggtgaggcaggcagtgctctcacaggtccatgtctgggcctcctgaggatgtcttcagcggcactgagtcaaatccatcaggagtcctcttggaggtaaatgatttgatc

SEQ ID NO: 8067 - DNA, 230 bp, Homo sapiens
ttttttttttttttttttttgcgacagcgcgactttatttggagttttccacctaagcagctcccagctgagctgcatgacatgtgcaaaagtcccctagaaagctgggcctcgcagtgtgtaaaaaaggccccccatgtgcagagccgtgcaaccattttaaaaaaagagacagtgagagagaaatcaggccccctgggagcctggcttgggtggagtgcacatcgctc

SEQ ID NO: 8068 - DNA, 854 bp, Homo sapiens
gaattcccaactctggagtcctctgagagagccaccaaggaggagcaggggagcgacggccggggcagaagttgagaccacccagcagaggagctaggccagtccatctgcatttgtcacccaagaactcttaccatgaagaccctcctactgttggcagtgatcatgatctttggcctactgcaggcccatgggaatttggtgaatttccacagaatgatcaagttgacgacaggaaaggaagccgcactcagttatggcttctacggctgccactgtggcgtgggtggcagaggatcccccaaggatgcaacggatcgctgctgtgtcactcatgactgttgctacaaacgtctggagaaacgtggatgtggcaccaaatttctgagctacaagtttagcaactcggggagcagaatcacctgtgcaaaacaggactcctgcagaagtcaactgtgtgagtgtgataaggctgctgccacctgttttgctagaaacaagacgacctacaataaaaagtaccagtactattccaataaacactgcagagggagcacccctcgttgctgagtcccctcttccctggaaaccttccacccagtgctgaatttccctctctcataccctccctccctaccctaaccaagttccttggccatgcagaaagcatccctcacccatcctagaggccaggcaggagcccttctatacccacccagaatgagacatccagcagatttccagccttctactgctctcctccacctcaactccgtgcttaaccaaagaagctgtactccggggggtctcttctgaataaagcaattagcaaatcaaaaaaaaaaaaggaattc

SEQ ID NO: 8069 - DNA, 1729 bp, Homo sapiens
aagtttcccttctcccagtccaagaccccaaatcaccacaaaggacccaatccccagactcaagatatggtctgggcgctgtcttgtgtctcctaccctgatccctgggttcaactctgctcccagagcatgaagcctctccaccagcaccagccaccaacctgcaaacctagggaagattgacagaattcccagcctttcccagctccccctgcccatgtcccaggactcccagccttggttctctgcccccgtgtcttttcaaacccacatcctaaatccatctcctatccgagtcccccagttcctcctgtcaaccctgattcccctgatctagcaccccctctgcaggtgctgcacccctcatcctgtctcggattgtgggaggctgggagtgcgagaagcattcccaaccctggcaggtgcttgtagcctctcgtggcagggcagtctgcggcggtgttctggtgcacccccagtgggtcctcacagctacccactgcatcaggaacaaaagcgtgatcttgctgggtcggcacagcctgtttcatcctgaagacacaggccaggtatttcaggtcagccacagcttcccacacccgctctacgatatgagcctcctgaagaatcgattcctcaggccaggtgatgactccagccacgacctcatgctgctccgcctgtcagagcctgccgagctcacggatgctatgaaggtcatggacctgcccacccaggagccagcactggggaccacctgctacgcctcaggctggggcagcattgaaccagaggagttcttgaccccaaagaaacttcagtgtgtggacctccatgttatttccaatgacgtgtgtgcgcaagttcaccctcagaaggtgaccaagttcatgctgtgtgctggacgctggacagggggcaaaagcacctgctcgggtgattctgggggcccacttgtctgtaatggtgtgcttcaaggtatcacgtcatggggcagtgaaccatgtgccctgcccgaaaggccttccctgtacaccaaggtggtgcattaccggaagtggatcaaggacaccatcgtggccaacccctgagcacccctatcaactccctattgtagtaaacttggaaccttggaaatgaccaggccaagactcaggcctccccagttctactgacctttgtccttaggtgtgaggtccagggttgctaggaaaagaaatcagcagacacaggtgtagaccagagtgtttcttaaatggtgtaattttgtcctctctgtgtcctggggaatactggccatgcctggagacatatcactcaatttctctgaggacacagataggatggggtgtctgtgttatttgtggggtacagagatgaaagaggggtgggatccacactgagagagtggagagtgacatgtgctggacactgtccatgaagcactgagcagaagctggaggcacaacgcaccagacactcacagcaaggatggagctgaaaacataacccactctgtcctggaggcactgggaagcctagagaaggctgtgaaccaaggagggagggtcttcctttggcatgggatggggatgaagtaaggagagggactgaccccctggaagctgattcactatggggggaggtgtattgaagtcctccagacaaccctcagatttgatgatttcctagtagaactcacagaaataaagagctgttatactgtgaa

SEQ ID NO: 8070 - DNA, 360 bp, Homo sapiens
tgcttatcacaatgaatgttctcctgggcagcgttgtgatctttgccaccttcgtgactttatgcaatgcatcatgctatttcatacctaatgagggagttccaggagattcaaccaggatgtttctacacctgtgggttatgacaaagacaactgccaaagaatcttcaagaaggaggactgcaagtatatcgtggtggagaagaaggacccaaaaaagacctgttctgtcagtgaatggataatctaatgtgcttctagtaggcacagggctcccaggccaggcctcattctccctggcctctaatagtcaatgattgtgtagccatgcctatcagtaaaaagatttttgagcaaaca

SEQ ID NO: 8071 - DNA, 334 bp, Homo sapiens
agttttgtctcaatgacagtgtttctacacctgtgggttatgacaaagacaactgccaaagaatcttcaagaaggaggactgcaagtatatcgtggtggagaagaaggacccaaaaaagacctgttctgtcagtgaatggataatctaatgtgcttctagtaggcacagggctcccaggccaggcctcattctcctctggcctctaatagtcaatgattgtgtagccatgcctatcagtaaaaagatttttgagcaaacacttgaatatgtagtgtcttttaatttataatttatgtatgcattgatttaatacacattataaagaatactttc

SEQ ID NO: 8072 - DNA, 384 bp, Homo sapiens; identical to SEQ ID NO: 7474

SEQ ID NO: 8073 - DNA, 372 bp, Homo sapiens; identical to SEQ ID NO: 7475

SEQ ID NO: 8074 - DNA, 358 bp, Homo sapiens; identical to SEQ ID NO: 7477
  misc_feature (1)..(358): n=a,t,g or c

SEQ ID NO: 8075 - DNA, 363 bp, Homo sapiens; identical to SEQ ID NO: 7478

SEQ ID NO: 8076 - DNA, 355 bp, Homo sapiens; identical to SEQ ID NO: 7481

SEQ ID NO: 8077 - DNA, 308 bp, Homo sapiens; identical to SEQ ID NO: 7482

SEQ ID NO: 8078 - DNA, 425 bp, Homo sapiens; identical to SEQ ID NO: 7488
  misc_feature (1)..(425): n=a,t,g or c

SEQ ID NO: 8079 - DNA, 380 bp, Homo sapiens; identical to SEQ ID NO: 7498

SEQ ID NO: 8080 - DNA, 358 bp, Homo sapiens; identical to SEQ ID NO: 7507

SEQ ID NO: 8081 - DNA, 349 bp, Homo sapiens; identical to SEQ ID NO: 7518

SEQ ID NO: 8082 - DNA, 4029 bp, Homo sapiens; identical to SEQ ID NO: 7524

SEQ ID NO: 8083 - DNA, 329 bp, Homo sapiens; identical to SEQ ID NO: 7525

SEQ ID NO: 8084 - DNA, 987 bp, Homo sapiens; identical to SEQ ID NO: 7531

SEQ ID NO: 8085 - DNA, 414 bp, Homo sapiens; identical to SEQ ID NO: 7534
  misc_feature (1)..(414): n=a,t,g or c

SEQ ID NO: 8086 - DNA, 543 bp, Homo sapiens; identical to SEQ ID NO: 7536

SEQ ID NO: 8087 - DNA, 371 bp, Homo sapiens; identical to SEQ ID NO: 7537

SEQ ID NO: 8088 - DNA, 265 bp, Homo sapiens; identical to SEQ ID NO: 7540

SEQ ID NO: 8089 - DNA, 357 bp, Homo sapiens; identical to SEQ ID NO: 7545

SEQ ID NO: 8090 - DNA, 268 bp, Homo sapiens; identical to SEQ ID NO: 7556

SEQ ID NO: 8091 - DNA, 343 bp, Homo sapiens; identical to SEQ ID NO: 7560

SEQ ID NO: 8092 - DNA, 512 bp, Homo sapiens; identical to SEQ ID NO: 7562

SEQ ID NO: 8093 - DNA, 3530 bp, Homo sapiens; identical to SEQ ID NO: 7564

SEQ ID NO: 8094 - DNA, 485 bp, Homo sapiens; identical to SEQ ID NO: 7565

SEQ ID NO: 8095 - DNA, 934 bp, Homo sapiens; identical to SEQ ID NO: 7569

SEQ ID NO: 8096 - DNA, 538 bp, Homo sapiens; identical to SEQ ID NO: 7570

SEQ ID NO: 8097 - DNA, 507 bp, Homo sapiens; identical to SEQ ID NO: 7578

SEQ ID NO: 8098 - DNA, 414 bp, Homo sapiens; identical to SEQ ID NO: 7580

SEQ ID NO: 8099 - DNA, 488 bp, Homo sapiens; identical to SEQ ID NO: 7582

SEQ ID NO: 8100 - DNA, 510 bp, Homo sapiens; identical to SEQ ID NO: 7586
  misc_feature (1)..(510): n=a,t,g or c

SEQ ID NO: 8101 - DNA, 372 bp, Homo sapiens; identical to SEQ ID NO: 7590

SEQ ID NO: 8102 - DNA, 346 bp, Homo sapiens; identical to SEQ ID NO: 7592
  misc_feature (1)..(346): n=a,t,g or c

SEQ ID NO: 8103 - DNA, 497 bp, Homo sapiens; identical to SEQ ID NO: 7595

SEQ ID NO: 8104 - DNA, 744 bp, Homo sapiens; identical to SEQ ID NO: 7597

SEQ ID NO: 8105 - DNA, 1272 bp, Homo sapiens; identical to SEQ ID NO: 7602

SEQ ID NO: 8106 - DNA, 5985 bp, Homo sapiens; identical to SEQ ID NO: 7612

SEQ ID NO: 8107 - DNA, 476 bp, Homo sapiens; identical to SEQ ID NO: 7620

SEQ ID NO: 8108 - DNA, 698 bp, Homo sapiens; identical to SEQ ID NO: 7626

SEQ ID NO: 8109 - DNA, 292 bp, Homo sapiens; identical to SEQ ID NO: 7635
  misc_feature (1)..(292): n=a,t,g or c

SEQ ID NO: 8110 - DNA, 712 bp, Homo sapiens; identical to SEQ ID NO: 7644

SEQ ID NO: 8111 - DNA, 591 bp, Homo sapiens; identical to SEQ ID NO: 7652

SEQ ID NO: 8112 - DNA, 630 bp, Homo sapiens; identical to SEQ ID NO: 7668

SEQ ID NO: 8113 - DNA, 233 bp, Homo sapiens; identical to SEQ ID NO: 7669

SEQ ID NO: 8114 - DNA, 530 bp, Homo sapiens; identical to SEQ ID NO: 7674

SEQ ID NO: 8115 - DNA, 612 bp, Homo sapiens; identical to SEQ ID NO: 7678

SEQ ID NO: 8116 - DNA, 891 bp, Homo sapiens; identical to SEQ ID NO: 7699

SEQ ID NO: 8117 - DNA, 438 bp, Homo sapiens; identical to SEQ ID NO: 7703

SEQ ID NO: 8118 - DNA, 433 bp, Homo sapiens; identical to SEQ ID NO: 7728

SEQ ID NO: 8119 - DNA, 350 bp, Homo sapiens; identical to SEQ ID NO: 7730
  misc_feature (1)..(350): n=a,t,g or c

SEQ ID NO: 8120 - DNA, 430 bp, Homo sapiens; identical to SEQ ID NO: 7732

SEQ ID NO: 8121 - DNA, 770 bp, Homo sapiens; identical to SEQ ID NO: 7757

SEQ ID NO: 8122 - DNA, 692 bp, Homo sapiens; identical to SEQ ID NO: 7760

SEQ ID NO: 8123 - DNA, 505 bp, Homo sapiens; identical to SEQ ID NO: 7765

SEQ ID NO: 8124 - DNA, 852 bp, Homo sapiens; identical to SEQ ID NO: 7778

SEQ ID NO: 8125 - DNA, 942 bp, Homo sapiens; identical to SEQ ID NO: 7779

SEQ ID NO: 8126 - DNA, 435 bp, Homo sapiens; identical to SEQ ID NO: 7795

SEQ ID NO: 8127 - DNA, 2862 bp, Homo sapiens; identical to SEQ ID NO: 7803

SEQ ID NO: 8128 - DNA, 630 bp, Homo sapiens; identical to SEQ ID NO: 7806

SEQ ID NO: 8129 - DNA, 255 bp, Homo sapiens; identical to SEQ ID NO: 7808

SEQ ID NO: 8130 - DNA, 291 bp, Homo sapiens; identical to SEQ ID NO: 5812

SEQ ID NO: 8131 - DNA, 1761 bp, Homo sapiens
ttgccgatccgccgcccgtccacacccgccgccagctcaccatggatgatgatatcgccgcgctcgtcgtcgacaacggctccggcatgtgcaaggccggcttcgcgggcgacgatgccccccgggccgtcttcccctccatcgtggggcgccccaggcaccagggcgtgatggtgggcatgggtcagaaggattcctatgtgggcgacgaggcccagagcaagagaggcatcctcaccctgaagtaccccatcgagcacggcatcgtcaccaactgggacgacatggagaaaatctggcaccacaccttctacaatgagctgcgtgtggctcccgaggagcaccccgtgctgctgaccgaggcccccctgaaccccaaggccaaccgcgagaagatgacccagatcatgtttgagaccttcaacaccccagccatgtacgttgctatccaggctgtgctatccctgtacgcctctggccgtaccactggcatcgtgatggactccggtgacggggtcacccacactgtgcccatctacgaggggtatgccctcccccatgccatcctgcgtctggacctggctggccgggacctgactgactacctcatgaagatcctcaccgagcgcggctacagcttcaccaccacggccgagcgggaaatcgtgcgtgacattaaggagaagctgtgctacgtcgccctggacttcgagcaagagatggccacggctgcttccagctcctccctggagaagagctacgagctgcctgacggccaggtcatcaccattggcaatgagcggttccgctgccctgaggcactcttccagccttccttcctgggcatggagtcctgtggcatccacgaaactaccttcaactccatcatgaagtgtgacgtggacatccgcaaagacctgtacgccaacacagtgctgtctggcggcaccaccatgtaccctggcattgccgacaggatgcagaaggagatcactgccctggcacccagcacaatgaagatcaagatcattgctcctcctgagcgcaagtactccgtgtggatcggcggctccatcctggcctcgctgtccaccttccagcagatgtggatcagcaagcaggagtatgacgagtccggcccctccatcgtccaccgcaaatgcttctaggcggactatgacttagttgcgttacaccctttcttgacaaaacctaacttgcgcagaaaacaagatgagattggcatggctttatttgttttttttgttttgttttggttttttttttttttttggcttgactcaggatttaaaaactggaacggtgaaggtgacagcagtcggttggagcgagcatcccccaaagttcacaatgtggccgaggactttgattgcacattgttgtttttttaatagtcattccaaatatgagatgcattgttacaggaagtcccttgccatcctaaaagccaccccacttctctctaaggagaatggcccagtcctctcccaagtccacacaggggaggtgatagcattgctttcgtgtaaattatgtaatgcaaaatttttttaatcttcgccttaatacttttttattttgttttattttgaatgatgagccttcgtgcccccccttccccctttttgtcccccaacttgagatgtatgaaggcttttggtctccctgggagtgggtggaggcagccagggcttacctgtacactgacttgagaccagttgaataaaagtgcacacctta

SEQ ID NO: 8132 - DNA, 326 bp, Homo sapiens; identical to SEQ ID NO: 1068

SEQ ID NO: 8133 - DNA, 370 bp, Homo sapiens
caaagaaattagcttttatttgagactacttttccccacatgtatcttttaagaattctatgctatgtgataacctgcttatccactgtcccaataccaaaatttctaacagcgaattatacaactgctctaggtaataaataagggttgtccttcactgattaagggaataaacttcaataaacttaacaacaacaaaaaaaatcacactttagtttttaagttttaacagatgtatttcaaatacagcatgttttacaggagttcacaagcttttcatctctaaaaaaaaactttcaactacctgactgttccattccaccccagacaaacctgacatgactgaactacttcatgtgttactttccca

SEQ ID NO: 8134 - DNA, 299 bp, Homo sapiens
tggaggaaagggacaggcctgggatatggccatcctggattggcttcatcagaggaggctgaaggcggactgaggggccccagtgttggagcctcaggaagaaccagcaaaagacagtccaacgagacttatcgagatgctgttcgaagagtcatgtttgctcgatataaagaactcgattaagaaaggagacaagttccatgggatacaacctccctcttgttttgtttgtctctccttttcttttgttactgttcttgctgctagaacttttttaaataaactttttttcaatgtga

SEQ ID NO: 8135 - DNA, 1361 bp, Homo sapiens; identical to SEQ ID NO: 3781

SEQ ID NO: 8136 - DNA, 340 bp, Homo sapiens; identical to SEQ ID NO: 460
  misc_feature (1)..(340): n=a,t,g or c

SEQ ID NO: 8137 - DNA, 571 bp, Homo sapiens; identical to SEQ ID NO: 3998

SEQ ID NO: 8138 - DNA, 473 bp, Homo sapiens; identical to SEQ ID NO: 5161

SEQ ID NO: 8139 - DNA, 255 bp, Homo sapiens
ggggaaaagccctatgaatgtaacacatgcaggaaaaccttctctcaaaagtcaaatctcattgtacatcagagaacacacataggagaaaaaccttatgaatgaattggatattagaaatttccagccacaagtcagcctccataatgcctcagagtcttcacactgtggagaagggcctgatgacatcctgaatgttcaataactatccacaaactcgccttatgttactccaaagtaacagtaggggataaa

SEQ ID NO: 8140 - DNA, 1559 bp, Homo sapiens
gcggagcacagtccgccgagcacaagctccagcatcccgtcaggggttgcaggtgtgtgggaggcttgaaactgttacaatatggctttccttggactcttctctttgctggttctgcaaagtatggctacaggggccactttccctgaggaagccattgctgacttgtcagtgaatatgtataatcgtcttagagccactggtgaagatgaaaatattctcttctctccattgagtattgctcttgcaatgggaatgatggaacttggggcccaaggatctacccagaaagaaatccgccactcaatgggatatgacagcctaaaaaatggtgaagaattttctttcttgaaggagttttcaaacatggtaactgctaaagagagccaatatgtgatgaaaattgccaattccttgtttgtgcaaaatggatttcatgtcaatgaggagtttttgcaaatgatgaaaaaatattttaatgcagcagtaaatcatgtggacttcagtcaaaatgtagccgtggccaactacatcaataagtgggtggagaataacacaaacaatctggtgaaagatttggtatccccaagggattttgatgctgccacttatctggccctcattaatgctgtctatttcaaggggaactggaagtcgcagtttaggcctgaaaatactagaaccttttctttcactaaagatgatgaaagtgaagtccaaattccaatgatgtatcagcaaggagaattttattatggggaatttagtgatggctccaatgaagctggtggtatctaccaagtcctagaaataccatatgaaggagatgaaataagcatgatgctggtgctgtccagacaggaagttcctcttgctactctggagccattagtcaaagcacagctggttgaagaatgggcaaactctgtgaagaagcaaaaagtagaagtatacctgcccaggttcacagtggaacaggaaattgatttaaaagatgttttgaaggctcttggaataactgaaattttcatcaaagatgcaaatttgacaggcctctctgataataaggagatttttctttccaaagcaattcacaagtccttcctagaggttaatgaagaaggctcagaagctgctgctgtctcaggaatgattgcaattagtaggatggctgtgctgtatcctcaagttattgtcgaccatccatttttctttcttatcagaaacaggagaactggtacaattctattcatgggacgagtcatgcatcctgaaacaatgaacacaagtggacatgatttcgaagaactttaagttactttatttgaataacaaggaaaacagtaactaagcacattatgtttgcaactggtatatatttaggatttgtgttttacagtatatcttaagataatatttaaaatagttccagataaaaacaatatatgtaaattataagtaacttgtcaaggaatgttatcagtattaagctaatggtcctgttatgtcattgtgtttgtgtgctgttgtttaaaataaaagtacctattgaacatgtg

SEQ ID NO: 8141 - DNA, 397 bp, Homo sapiens; identical to SEQ ID NO: 2810

SEQ ID NO: 8142 - DNA, 445 bp, Homo sapiens
tttttttaacagcagatagattctttatgttcaagacagcaaattcagatacaaaaacccaccgccatcgtccctccctccctcctgctctgggccagggatgggcctggaaggagagatgggaggtggggaggaggttgcggggttcacagcagactcgtgtcaaatgcggaggtaacaggctccacagggagggggctcctctcaggaggggtgagggcattattgcatttgctggggggaaggacaaccctctcccctgtattccctgcgtcaggaaactaggaaggtcatgacccccaaacagaacccaaggccccagggagacagagggaccagtttggcagctgatggtggaaagtggtggaggcgggggtggccgccaatttggctgatccctcccctccctgtgcctgacccagctgaggtaggtggggaacagggc

SEQ ID NO: 8143 - DNA, 245 bp, Homo sapiens; identical to SEQ ID NO: 2116

SEQ ID NO: 8144 - DNA, 366 bp, Homo sapiens
aataaagacaagtgttcagatttatttggaaattcacagtttctaatggcactacagctccgtagttacatattgaaaattctcttcccacaacacacagatcacataatttctcactgtatctctgctctcatctggacctcttttcaaggggcttctataaaatcaggccctcttgctctgaatagctaattgtgcagacaggaaagaaatttaaatcttctaaaacacgctgttaacctaaagcagcaacttaaacaaacaaaaaaggcgttaaataagtcacattacaaacaatacccaagaaaggtattaggcaagtttaaaaacagttatcactactaaaagtgctcaataagttataac

SEQ ID NO: 8145 - DNA, 402 bp, Homo sapiens
agggagtatggcatttattaaccctgtgtttcccccgtcactggtcactgctcttgactcgtagaacaacaggtacagaactgcaagggatcatccccagctccgtgatcaccagatccacaagctctgggggagtcacatcatagactagattcaacaaccgtagtgatgcgtggttctgccagttagccagcgcaacatgttctccccgcttacattgcagatcatcagggtcatctagctcattagagacaaaggcatcagtctgcacacgctcacagaacttgtatgtttcacagcaaaccagcactggtacattatgggctcgagcaccagggctaactgtgctgtccctacccgtgacatcacagacccgttggccaaaagtgcatgagctcccat

SEQ ID NO: 8146 - DNA, 410 bp, Homo sapiens
gcgcacccaagccggtttatttggtctcccgcacacactcaggcctgcatcaccggccgtgatttctccgcttgcagcttcactccggagcccgcgaacgcggtaccgccccgctgcagcacgatgatgtcgcggtctgtgagtttgtctccagtcacagggtccaccatgtccttccgaatcagcttctccacgcattcgagggtgaccacagccccagaggccgcagcacagcgcagggggtggcgttgctcaggctgtcgcgggtcacggcacacacgtagcgctcgcttgcgggtgatgagccccacgcggtccacggagctgtctagcggtgtgaagtgcacgggcgtcaggtccgacatgcgcaggggcttccctgacatggggcaggtcaccgtgcgggacgg

SEQ ID NO: 8147 - DNA, 432 bp, Homo sapiens
tttttttttttttttttttttttaaaatgaggttacctgctttatttggataccaagttcccttcagacagcattaaaataaagacaagtaagactacacagataaaatccagtataattcaaatccaacaatgaaaaatttcccccatattgttgcaaaattctttctactgaaatgctttgctacaataataaaaagcatacattacatataaaagataccagtgtactaaaaagtgacagaagtggactagcaaatccttcaaagcacattatataaatgactagcatttaaaaacattttttcctataaaatgtaggtcatatacatttataaattggcggttttatttctaaagcagtgatgtgtgtgttcaaatagctgtcctgtacagtataatatctactcacttgaaactataataggtttgt

SEQ ID NO: 8148 - DNA, 120 bp, Homo sapiens; identical to SEQ ID NO: 2123

SEQ ID NO: 8149 - DNA, 470 bp, Homo sapiens
ttttttaactgagagttttctttaatataattgttgtacagcaaggattcctgctgtatagagtatatagaagatgacatactctaggaattagaacaatatatattcaatacaataacaaaactatatagtactttaagaactctttcacatatatgaacactcttacttagaacttcagctgtttaaagtaagcaatatgcaagcctataaagtacacaccaaaaaaatctaacctacaaaacacccaaagcaaatgttagcatatctctattatcaagaatatcttctcaccatcgtttctttcaaaaatatgtgaaaaagttctttctttccttatgagtggcaatttttaaaagtcccctcttctgaaattcagatatgtttcaaatcacactatcatcttcttaaagaaaaatgaaaaccactcctggcttttagatgctgggaacatagtttaccacatattc

SEQ ID NO: 8150 - DNA, 407 bp, Homo sapiens; identical to SEQ ID NO: 1328

SEQ ID NO: 8151 - DNA, 423 bp, Homo sapiens; identical to SEQ ID NO: 4364

SEQ ID NO: 8152 - DNA, 386 bp, Homo sapiens
tttttttcctcctgcatatactttattcacacatgctaaatctcactaaacagatcacactgtcaaggaagatggctaaggagaagctagggttgtcaaggtaatccttgcttcggccctgttttgcaacaaggtaataaacagccagaacagactggagtgaagcaggttaagggtgaggagagaacacagtgcagtgcagggtgtggaaggcagctcacagtcagggaggcagcagttctagccaatcaacactttatttttcaagtcaacacctgcacagatgttagtgtccacttcctgaccctagtagggggtccactacacttggatcacccagaggagcagtaaggaagctcctaatctcaagagagagcacatgctca

SEQ ID NO: 8153 - DNA, 434 bp, Homo sapiens
  misc_feature (1)..(434): n=a,t,g or c
ttttttttttcctcagtagccttgattgttgaaggagaaaattacccagttttaagaagcagttacccagatgccttttgtgtggcctatactctcccaattctaattcatgcattcttcaatgagcatagagcagttactcctctaaagaattaagtaaggaatgagtgcaagtaaattgccagggctgtcacttggatcactgacttgcatcgtggtttgcaggactctaaaccctccagantttcaatacagagcacgattgatttgtactgagttgactttgcaaatctgataggttataactgcttcagggaaagtgagaaccacaggaaatgagagcaagccagcaagcatgtgaataacctttgccctcccatctccttaccccatcatggcaaatttaacatatggacaaaccacatttttatana

SEQ ID NO: 8154 - DNA, 463 bp, Homo sapiens
  misc_feature (1)..(463): n=a,t,g or c
tttttttttttttttttttgatttggtaattaaagtttatttgaacacaaaatactttctctgtctataaaattggctgttagcagtagcagcagcatgtcctggccaaggggagtagatttctccagactactaaagccatgtatatagccattcccacttcccatattctgtggatatgtacatgtgcatggtagctagagtccctccaccaggagtatctctctcatggatggtttcttcagggagaggaagaggagacctggggtgaagagctgggatggttttgagtggggcaagccattaggctgttaccttgaagcccagtctctctgggatagctgtactgcagggtgtcctctgaggcccttctctgtactctgtctggctnaggggaatnggggttattttggactcccataggaaaggcacttagcctaagtcaccaaatngactgcttggg

SEQ ID NO: 8155 - DNA, 433 bp, Homo sapiens
ggacaccaactgcagcgtgatttattggacaagacgtgcacttttcaacagggcctcagtaaccacggtttccttcactgatcagtacaggaccagggtaaaggggcttaaagataagaaagacaaactcttcccaggaacagatggggaaagaaaggaggaagaagaggcatgtcctcccttcctccttccctagtactctgggcctccgttcaccccgtgctggagtggggctgaccaagggaagctgggggcagtgtgtgtcacagccagacatgagctgaggctgtgactgtccactcagggtcaaaatggccaggtggacgatcaactctgtccccacttcaggcccccagatctggtcactgttccaggctccccccacccgccccaccgtgggtatggttaaaaaatacaaaagcggattcaatgc

SEQ ID NO: 8156 - DNA, 452 bp, Homo sapiens
  misc_feature (1)..(452): n=a,t,g or c
gcagtgggttcttttaattactgaattcagtatgttagcattttatttgggatttctgcatttatattaaaatgtgcatttaatagctcaataactcaatttgtcttatcagttagcaatatacaaatgcaattatttttaaatcaacaaaaggtaactaaaattaaatctttcagtgatgaatttgagcagagtaagagatctaataacaggttgacataagaaatatttgtctcaaaaatcaatgtatttaatagttgacagttacaaatctcatcattattgttccttcagtaaaatttaaatattcccacagttctcaatcaaatatgctttttcagttttccaacagctgtgatttttcntcttttgggtctattcagtagaaagtgaactatctgaagtagaacatcatcattaanacctttcacatcattatccncaattggttc

SEQ ID NO: 8157 - DNA, 467 bp, Homo sapiens
tgtgaatatgggcggtgagtttcctttaatcaaagacaaccatgacaaatttattaactatcaaaagctacattttactaaaaacaatctgcctttaaaaatgttgaatcatacaatatgtacaatacatgccgctttccgttttggacttcactatccatttgagtccttcagctagcatcaagcacttggcttctgctgcctctgacttggagtaatcacaggctctgaaatctcaaaggtcttcacaatctcctggcagacaataatgaacatttaggcactgggcttactgcaagtgaaggcagagtcagaactatgcaggggcaacaggcagagctttacctcccagtcacggtaactcaaagctataattccttgatttctaacttgtgtggttatggttcaaatccccccattttcttcattaatacctaaaagggcccggtttgaaagacaaatttttt

SEQ ID NO: 8158 - DNA, 384 bp, Homo sapiens; identical to SEQ ID NO: 7530

SEQ ID NO: 8159 - DNA, 211 bp, Homo sapiens
  misc_feature (1)..(211): n=a,t,g or c
tcaatatttattgaaatactgaaaaaaaantccattttnttgagaagttcctggcaagaactgacatgacaatatgtatttcattgatacagtaagaaaacatcaacaagtaactgacttcgcactctaaacattgcatggattcaagtccaaggcagctgcagatctgtgatacaantaatcagncattagngattgtctgtttacaaac

SEQ ID NO: 8160 - DNA, 404 bp, Homo sapiens
  misc_feature (1)..(404): n=a,t,g or c
tttttttttttgctgtgaaatcttttatttttgttttatgacacagcatcaatttcatgaatactttgaaagggccattagaaaaaataagagccaatttgggtcatttgagaaacattttcagcacaattacagtgggggcacgggccgttcggctccagctgggttttcccagatgcaacaatcgcggttctggcttctccactggtggggatggggatcgcgccttcggagctctcagggcgcctgtctgtcgggggctgggtgcgtccacagccccgggggatggcgcgtggctagccagggaacggcatntggggtgggtctctgacctgcttntgcagggacttgagggacctcatcccgatggccgaggcaggggcttcccacgggataaaaaggat

SEQ ID NO: 8161 - DNA, 411 bp, Homo sapiens
  misc_feature (1)..(411): n=a,t,g or c
aagtttaatttcagaaaattatagtcccaggntcactctcagaaaaccacaggtttttagtcatttctggnacaccaatcccaaattatacagaaaaaagaccaaaatgtttaaaattaactgacttgggggaggttggagttcccttcctcatgcagaccggagcatccatagaatgtctatctagcctaaggggatatagantgcacctgattttgaggggtctgggaagagagggataaagagaggccacacagtccaaccaacaccccaggcaggattcagtttctgatgcttgcctgaaggcaacaaaggactttctggaaantaaaaaaaaaaggnaaaggnaaaaagggcaggactttacacctcatcaccgggggggncaagggcggggagggggggttttga

SEQ ID NO: 8162 - DNA, 471 bp, Homo sapiens
  misc_feature (1)..(471): n=a,t,g or c
ttttnnnnaatagctaccgtttattgggcactgcaatgttaccaggnactattaagcactttaaagacatgacttcatttcatcttcaccacaactccatgaggtaggtgttatgatccccacattacagatgaggaaaccgaggttctgggcactgatttcatttgtttgaagtcacacagcttgtgagtggtgaggctggaatttgagcccagangggtggaacccaaggcagagcttgcaaagttgtgacatcagtacagtgtgttattgtacccgtccagggggccacagccctcnaccttccttttcaaaccccattntcagggataggggtctggaaactcctgcctgcagaaaaggcttgtgtgtctccctcccgggtnggacctgcatttcgntttggttnctatcagagggaatgaagctgaaatcgtggcaacgtnagggcagttgcctggggtgggggaa

SEQ ID NO: 8163 - DNA, 383 bp, Homo sapiens
gaaaacaaaaatttattgcttctccttccaaagctttgtgaatttacaaaaaaaaggatgaaagtttacaaactgcttagttccaactaagcataagaggtgagaacgtacactgcagggccaccagcagcagctgtgcactcgatcgttaaaactggctcccccagacttgtagtgctgtcttcagggggctgcattccttacacgccacctcttgtgacataggtcattggtcaagccgctggaatgctacagaggtttttttggttttgagaggcttttttttgttttgccttcctactataaaagcgaaattttcagttcatttctgaaaaataaattggtcaataaattcattttgttctgcttctactttacacaaa

SEQ ID NO: 8164 - DNA, 327 bp, Homo sapiens
acagatgcaccagtggattttattagtgtgaacgcagcagcctcgtcgccccgggagcttagcagggcgtcgagggtgagcagcgtgtcttcccgcactgtgtcttcgctacagaagttgtacactgtcttctcttctcccttttgcacagtgatcttggtggcacccactttggggagggttggatttatcacattgttattccaaagaaacttgactttctcaattgttccaacatccagctttgcatcaaactcataggaatgggttgagcctggtttgagaatccccctgaagatgctgtactggtgagtgtttcccttattt

SEQ ID NO: 8165 - DNA, 173 bp, Homo sapiens
  misc_feature (1)..(173): n=a,t,g or c
ggcaggtttccttttattggttctagacagtttgtggaaggaagagatgaggccatctagaggccggcagntcgcccagtgccccaaacactgccaccctgaagtagtgttggaagctgctccagggatgttgcagccctaagcacagtgacaggtgggggcaggagcagcag

SEQ ID NO: 8166 - DNA, 426 bp, Homo sapiens
  misc_feature (1)..(426): n=a,t,g or c
ataaagaaaaatgtttattttggctcatgcttctgcagggcgtacaggaggcatggcactggcatctgcttctggtaagggctcaggaagcttgcagtcatggcagaaggcaaaagggtaatcagcatatcacatggcgagagagaacaaagagctgccaggctttttaaagcaaccagatctcatgtgaacttagagagtgagaatgtaaggttagccgagagaaaggaccagagagagagagccccaagttcaggcaagcctttattaacctgtcggctgcccccttaacagtcaaggaaagcagccccaagcttacagaatagggggtttacattnggggcagggagtttgagggagtcctttggtatggctncatcccggggttgtctgctggttaatttctgccacatatcaccttgtgaa

SEQ ID NO: 8167 - DNA, 410 bp, Homo sapiens; identical to SEQ ID NO: 6559
  misc_feature (1)..(410): n=a,t,g or c

SEQ ID NO: 8168 - DNA, 142 bp, Homo sapiens
aacactgttcattgatttatttaaattaaaaaataattgtatatggtaaatatctattaagtacaacatgggacaggcacggtgcctcatgcctgtaatcccagttctttgggaggccgagacaggcagatcagttgaggcc

SEQ ID NO: 8169 - DNA, 114 bp, Homo sapiens
ttcttttttttaagcttccacctcagtgttttactgagaccagcattggggcatatgaggcacaaggaatccagctctgttccctagaagccatccacaaggttttccttgtag

SEQ ID NO: 8170 - DNA, 172 bp, Homo sapiens; identical to SEQ ID NO: 5746

SEQ ID NO: 8171 - DNA, 404 bp, Homo sapiens
ttttttttttttttttattttttaaaattgaacctttttttttttttaaaaaaagcacataaaccctacatactaaaattatacacatcaagtactggtccaatcttatatcaatctatttacaattaaacagcaccatggttttcccacctaggttagttaaacatgcccagagaattgttattcaaagcatatgttcctttaaaataaaataaactcttaaaaagagagctcaaatcctcaacaaagaaagaccttttaccaatcgatatcatagatattgatgacatcaccaaatttgcttaagaaaaaaacagttttaaacacttttttccagttgacaaactttgagaagtgctgctattcgatgtggcacacaaatgaacaaaaactttgatgacagg

SEQ ID NO: 8172 - DNA, 405 bp, Homo sapiens
gaagctttctagaaagtctttatttttctgttatgaataattgcattttctaattatcccaaatgattttataaattccgtaacttttatatgcctgcctgggatccatgaaataaaagtattccttaccaaaagagaagcatcagatacactgaaaggctcaatgttttatattttcagacataaaagtgactgtatacccttttattaactatatggtagcttggtaaaatttttatagaatttttaatgatctatggtgttctatgatgaggcaacattccaccaaattagccttccaaaagttgcagtatcatgtataattatgacagcagttttgttttaaaaccagagtcagattgaatgtagcttttttacagctgaaatttatgccttatgtgtatt

SEQ ID NO: 8173 - DNA, 318 bp, Homo sapiens
tttcacaacaaaatttattagaagaatagtggttttgaaaactctagcatccagtgagaactaccatacacaacattacagctgggaatgtttctccaaaatgtcatggtcaaataatacaatggaaccattaaatcttacacatgcacgaaagaacaagcgcttttgacatacaatgcaaaaaaaaaaaaaaggggggggaccacatggattaaaattttaagtactcatcacatacattaagacacagttttagtccagtcaaaaatcagaactgcattaaaaaatttaatgtagtgcaatcaaaccaaaaaactt

SEQ ID NO: 8174 - DNA, 437 bp, Homo sapiens; identical to SEQ ID NO: 2291

SEQ ID NO: 8175 - DNA, 188 bp, Homo sapiens
tttgagaaacgaggctttatttgctccaacagatattaaaagtatgagaaccacaaccatgaaaacaacagaagctgatgtgagaaacaacactaaaattaaacagtgcagacacaggtccagcgacaatgattttagcactcatacaggtggcatttcggtcagtgcatgatgattcagtgggcgaa

SEQ ID NO: 8176 - DNA, 497 bp, Homo sapiens; identical to SEQ ID NO: 53

SEQ ID NO: 8177 - DNA, 330 bp, Homo sapiens
tttgcacttcccatgagcatttttattaaattgaaacaagttgttgattcgataattacaagacttgtacaaaaattcacagcgcctgtgaggagcctttggtgtgaactggtgacacctgtgcctctccggacagaggaaggaagtcccaccccgccttccagcagcagcgagcctgtgtctggcattccctgttccgctgctcccaccctcactgtggggcagcagttctttaggaacattcagctgtcaaaggtgagaaccagccccacaggcctgggcctcgcaggcttaaggagcacttgttggcactgttagctcagcacctct

SEQ ID NO: 8178 - DNA, 358 bp, Homo sapiens
tttttttttttttttgacatttgtattttaataaaggataataaaagccaaattacagccaactgttaaagctttttttttttttaaattctatggtaacaaaatcagttcaggggctttttttctgaacaaatgatcatgatccctcagtctttcccgtggcatgctcctaaaacaaccctctatgtctaatcagtcacctaagatattgagtggcaagtctttcacagttgctgcttataattcctaaatggtccatattgagtattttcatttctgggtaagggaaaaagcattttggtccattaattcacccactcgctcctggaggacattaaccaattctgctattacgaag

SEQ ID NO: 8179 - DNA, 473 bp, Homo sapiens; identical to SEQ ID NO: 67

SEQ ID NO: 8180 - DNA, 589 bp, Homo sapiens
tttttttttttttttttatttcttaatattttaattatcattataatttggcagtaaaaatcacttttcacaaagacattacacttacattaacaaatcactcttgattcattcatttttgtttttccatttctcctggcagctttgtaagaatccataacttcaatatgtctaactcagttttgcttagctcatggtaaacatttggaaaactatgaaacttcgtggtcactcctagagattttaacattgagtttgtctcttctgcccaagaatgaagaactaactcatctgcagtaccatgacactgaaataattcaggaagtacaccattactcttctgaagagcctggtaaacagcagatgctttattcagaaaactagaaagagcaaatactcctgccacatcttgatgatttctatatgctaaatgcattgccatgcatcctcccatagagaatcctcctattaatatcctgttcttcttgatgccactttttacttcttcatcaatcaaatcagtaagcacttgacacatgacatcaattgattcaaggtgttctgggcagtcattggttattttaaatct

SEQ ID NO: 8181 - DNA, 371 bp, Homo sapiens; identical to SEQ ID NO: 6776

SEQ ID NO: 8182 - DNA, 216 bp, Homo sapiens
ttttttttttttttttttttttttttttttcttcgtaggagtcttttattttttggtgtcttaaatgtcaatgatcacaaaaacttccgggttctcttcattatagacctgcattgctgaatatgttattgctttgacttctgttccctaaagttggggttagagaaaaaaaaaaaaaaaaggaaaataggatattgaaatcataatcattaactc

SEQ ID NO: 8183 - DNA, 339 bp, Homo sapiens
aatttggaacacaaatgctttatttaagggtgcatcacaattcccgtgtggtgagcaaaaaataaaataaaggagcagatcgtagcacaccattcccactggccaagtggttgaaccctgcatccaagacccagtgagcagccaagtgaggtgcacctctgggcctctcactcatgactccamcagaattagcacattgcccttgtgcatggggccttttacattgcagattttggagcagcaagacaatgtatatctgttcgtamctcttgttctyccctcctgatttttaaaactgcgtaattataaaactatgttgatggacatataattattata

SEQ ID NO: 8184 - DNA, 242 bp, Homo sapiens
  misc_feature (1)..(242): n=a,t,g or c
gatcggtcatgctggggccaaaaacatggcaagaaacgtcccactgtcaacctcccgggcaagcgtgtgcacctgcagctcagggccagcccaccacactgccttagtgacactgcagccgggggagccacaggccgccagcaggctgaggaacaatgccgtgtgacctttccnncnnnnaaaaaacaaaaactgcaatttttattcaaataaaaaaagggtaaaaataaaagttaataagg

SEQ ID NO: 8185 - DNA, 252 bp, Homo sapiens
  misc_feature (1)..(252): n=a,t,g or c
gatctccctgggctacagttaaggaacaagaaaggaagcttccttggattagttaccaattctaagttcagactctacagtaaatcatgacgacagttaggggagccagccttggaataaaggtgacaaagaggacagcacagtacagacagggcaacatgtacctgatgatgtcactcagctgctaagtcacatgtctctacctttgancttccagttaatgtgagacaataaatttnatgttgtacacac

SEQ ID NO: 8186 - DNA, 156 bp, Homo sapiens
  misc_feature (1)..(156): n=a,t,g or c
gatcttgttcacaagtnaatctgttgacagtgccaattaaatgataataaaaaaattaacatgtcacaatgtaacggatgaccatatgcacaattccatgaattaaatctgtttcctgtgttagtcagtattcttaaataaaatttataattgaaa

SEQ ID NO: 8187 - DNA, 123 bp, Homo sapiens; identical to SEQ ID NO: 7887

SEQ ID NO: 8188 - DNA, 268 bp, Homo sapiens
  misc_feature (1)..(268): n=a,t,g or c
caatntgtttgggactttgagggctggggtgggaaggtagtggaatggaatagataaacagccagtcaagwgyttttgkktggttkwyagaattggggtgcaggtacatgtaggwtacacagaagctttgtgtctgtggaggctgtatgagtctgtgggtgagcagcatgtctaagtgggtggaaacatgtatagctaaaggcaggamctcttcccatacagctaaacccttgttcaagcaatttaaataaacaagramcattttaaa

SEQ ID NO: 8189 - DNA, 264 bp, Homo sapiens
  misc_feature (1)..(264): n=a,t,g or c
gacagatcaattgtaatttatttncttttaacactgtatcatcataaagaaaactggtataaatgaaaaaatctatttcaaatatctacatctaaaattttaggcagtgaaaaagcactttgttgacaaggagtgtggaatgatgtatgttaattgtcagaaactgctgaatgccttgtttagttgtcacaaacaaattcacatatcagaacggacaatactgctaaatattccttttttcctgcttttttttttttttgttaa

SEQ ID NO: 8190 - DNA, 246 bp, Homo sapiens
ggccatatttttatttactacatatactataaacatatacaatacatgctaccaaaaaaaatttttttttaaatttaactgtcaagaaagtgtatagtgttataatacaatggcacatgtttatattttatttcaaattggtttgcttatcacctatttcaaaccattaacagtgaaatgttacttgtggataattaaaaattatctatttgcattattaacaataaacaattccaacaaattaat

SEQ ID NO: 8191 - DNA, 395 bp, Homo sapiens; identical to SEQ ID NO: 990
  misc_feature (1)..(395): n=a,t,g or c

SEQ ID NO: 8192 - DNA, 432 bp, Homo sapiens
  misc_feature (1)..(432): n=a,t,g or c
tttttcacaatgccgtttgtttatttactcatagctatttccttccaaaaataatgcaatgtcgcttttgggaaaaacatacaaaggacaaaaaataagtcgatgaaggatcagtgaaaaaaagaatgtacaactggttgggttgctacacagaaacaaatacgataaagttctatacaggagggagagatgggtcataagtatgatagggagcttcccagtagccaaagcaaagacaaaacaattgtttcaaaatttcgcatatccataagacaaaatcaaacctaacgggcccgggaagaagccagtgattatanggctcctaaggcctggagaccaaaattcctccccagtaagttttttttttaaaggacttagtccttaacgncattttccccggtangggcgatattggtccagccaagcttttcc

SEQ ID NO: 8193 - DNA, 447 bp, Homo sapiens
  misc_feature (1)..(447): n=a,t,g or c
gcagaattgtgtttattggcatagatgcttatgatatattgttaattgaaaaagcaggtaacaaattaatatacagtattatgttaattatgtaaaaaagtatacatattcatagaaaaagtttggaacaatctcagatatcatctgtaggctatttctcgtttgaaaataaccaaatagatttttgggttgactcaacaaattatggttgagtcagtcttactttcctattttataaatgttttttacatcattgggtatttaatcattttaaaaatctactcaggcatcatttgtataatagtaataataatttaatcccccttatttctcatgtctcatgccttatccatcatccctcatatcctactcttagcccagattttccttgacaggcttattttctgggaggggcaggtatgggggaacnaaatttgtttccttacc

SEQ ID NO: 8194 - DNA, 413 bp, Homo sapiens
  misc_feature (1)..(413): n=a,t,g or c
gctcttggaaatatttttattnggttctgagataacagggctgaggcgagctgggacgggcgcagagnaacggtgggaggctttgcctcggggcggacatgctgtgtggggtctgctggcgggctccctggcccacccagccagcagcagctgggcacatggcccttggcgcctgggcatgacctctgccggcttggcacggtggcctcctcgtcggcgggcgccccgttttccagttgcaggagttagtctttcacagtgcggaggggtnggggtccggggtgggcgcctccccggggtgcaggcaggccccatccgccagtacatcctggggctctcggcggctacagcgggttgaggcaagctctaagctcctcttaagccccgcctttgggagcttggcagtcctggag

SEQ ID NO: 8195 - DNA, 401 bp, Homo sapiens
ttccatgtgttaataccatcatcaccatttaatttttaacataaactttacaatatgtacaattttatttggataatacacttacgtgtgaattgtagaaatcaagcatgtatattatatacatgtgtacacaagcagttgtattcacaggataagtgcatttgatcatctctgatctatatcaagtggcaagctgacctcatctgatacaattagatatgaacacagtacaatgtatagggattgaatgggaaacagtaactgcatattgggagaacttttcaagtatagaccccacagcacttttcaaccctgtttcaccaaaaagagatggggtatctggaaaggtctaattttgtctccagtgaaaataaacagtacttttggaaggaaaattgcct

SEQ ID NO: 8196 - DNA, 477 bp, Homo sapiens
agactgcttttaaattgctttattaactttacagtatgcaataaacatctttccatgaaagttgatgaaagtcctcttctgacagaaaaacttacagactaggtcaaaatgcaatctccaatcagaaaattgcagaagaatgccaaaaggttcacattaaaggtacaccaggaaaaatgcgaatttagaaagcagggattttatgattattaacctcaagattcaaggcataaggcaaaactcatcatgatgatcatggtgaggagggtcccctataagaatgcgcagactgtacctcaactgaagttccctaattttcctccttagctctctcatctcctccatgaaccgttccatatcatctccatctccatctatcatatcaatgttatcgacaagcctattgggcacatcctctccaaaacccggggcaggtggagcccaaacccctttaacatttcctccaggctcctggta

SEQ ID NO: 8197 - DNA, 460 bp, Homo sapiens
  misc_feature (1)..(460): n=a,t,g or c
tttttttttttcctgatttaaagtattttaatgcgagctgttaagtatgttagcatctgcctgggttcttatcggtcagtcattacatagaccccaaatcataaaggngttctagttttatatctatggggaaggctggaaaattaccacaaggggagagagagaaggtggtgtaaaaaggcagcctaactaactatttttaaaagcagatcaggagatacaggagctaggtgagatgctgtggacagtgcatgaggttcaattgtgaaaaccgatgtcctcattaatgacagagagaactctgtccctccatatacttggctgggcatcatcagtccagggtctcttatacttggagttttccanatgtttggtttcatgaagcacactttaccaaaatttaggaaaagaagagaaagatctccaacttttaaggtaatatacttttggccataaatan

SEQ ID NO: 8198 - DNA, 317 bp, Homo sapiens
  misc_feature (1)..(317): n=a,t,g or c
aacatttttttatttttatttttttgtgaaaaagttctgatgtcaactcatgtttggtatgatagattttaaagggctaagatatagagaatcacattcctttccaggagttacttttgctgttatgtccttctggattctacaatataaatctactcctagaacatcacattccttctttcatttcttcttctctcttcctttcttttcttatttgtctagtagagataagctataaaattctaccactaggcaattccaatctgaatttcnttttttcataatttaattctttaaattatctgaagtgggattag

SEQ ID NO: 8199 - DNA, 455 bp, Homo sapiens
  misc_feature (1)..(455): n=a,t,g or c
acataaaatactctgttttttattaactgaatattttcttaagcataataatagacaatgaaagaattgcacttattataaaggtacagtaaagtgttagattgcagctcagccatgaaagatcagggactgtaggacagatgatagattgtgcattatatgcaaagatgatggtggccagtgaaattaaaatgagagcaactagttacagaacaaacagggggataacagaagaaaacatgcactactcctactttaatgcaaaactaatttctcccaggaaaccaaccctttgacctctctcatacaaagaaacgggttctgcacccctaagcaacacagttagacttgggacttgtgtattcaaattgctagttcactgtctctgagcgtgctgctccagtgacatctccgtaagctggccctttgacattctgggagcaactacaatattn

SEQ ID NO: 8200 - DNA, 139 bp, Homo sapiens; identical to SEQ ID NO: 7547

SEQ ID NO: 8201 - DNA, 438 bp, Homo sapiens
  misc_feature (1)..(438): n=a,t,g or c
ttcggcagccacaaagactgggatttcnaattctagttatgataagtagacaatttaagccatttatccttttttctgtttccttttcaagaaaagaaaatcgtatttttataaaatatgatcatgtcagtttggtctatttttatatgtgttaaggagagcaataatagtcaaaagaataacaatataacgattaggtatttagttttaaaaaaaaaaaaaaagtagaggatggggcaatagatagcctgcctcttctctaaccaatttgttaactgtttaagaaattaacaataaagaatatggcatatggaggccagaatgttacttttatcatgaacaaagttggattncggagaatgcagcttatcncctacttggcaggcagatggccatcttaattctatatcccagaatttaancaggtctcccagccac

SEQ ID NO: 8202 - DNA, 466 bp, Homo sapiens
  misc_feature (1)..(466): n=a,t,g or c
atttcctgaatctttttaatggttgcattgtgttctactgtatggatgcaccattcccaatcagttccctattaacggatatttgggttatccctaacttttgctatgacaaatagcactgcaataaccttgtatacctattgtttccatgtgtggagctgcaccttcagaataaggttagggttagaagtataactgcaaggtataagaataaacacaagtaattttgtactccgtggaacttgaaccatttttccactcccaccaggaaaggtaatttcaacgtgtatttccattgtaagtgaggtggagcgactttctatgtttaaagaccattacggtattttttctgagaatcatctgttcatgtccttccccattttctcctttggcttttgcactttttgttttcaatttttgagagctcntgtgatacgagttgcnaagattttctccagaccgatct

SEQ ID NO: 8203 - DNA, 164 bp, Homo sapiens; identical to SEQ ID NO: 5364

SEQ ID NO: 8204 - DNA, 299 bp, Homo sapiens
tttatcttttcatcaccattatttattatatatgaaccaggttttcagcacaagtcacactcaacacccttacccaacaggaggggcgacggaggctcagagagggagtgtagggggaggatgtcaatgggaggccccagcctgagccctgagcagctggccagccaggaactggcattgttgagtgagaggcatcctagtctcctgctgctgcaaagacaatgcccgctgaacaggatggcaggccacatcagcagtccatacagaagtgaggctgtcgtttcttcccctggagcacc

SEQ ID NO: 8205 - DNA, 407 bp, Homo sapiens
  misc_feature (1)..(407): n=a,t,g or c
tgtaattttgngnattttttttatttagatactgatgtttattttccatgttgcttaagaacccgtgcaagaacagcttaagaccttccagtggttgctcctacccattcagtggcctgagcagtgggagctgcagaccagtcttctatggcaggctgagtgctccagtcttcagaagggaactgctgaagaggcacagaaggcacctgcatgccttcagatcagtgtgcaacctcaggctgagtagcagtgaactcaggagctggagcagtccattcacactgaaattcctccttggncactgccttttcagtagcagcctgctcttcttttttaatcacttcagggatctctgtagaagtagagttcaggcatgacctcccatggntgttcacgggaaatggngc

SEQ ID NO: 8206 - DNA, 444 bp, Homo sapiens
  misc_feature (1)..(444): n=a,t,g or c
gagncnatctcgtttattttttgtatatacatctacatacattttatacattatattcatatatacatatatacaaatgtatatatgtttaaagccacgctataagaggaagtaaatgagaaacagacaaatgaagtggtagctggaggacgtgggaatcagtacaggttttcacgcctgtttcagaaatgggagattctacagcacgctcgacactaacacatcacatccataacatatcacatccaatagacaggacagccaaaaacacaaaacaaaaaaagaatcaaatacccacacccagacacaatactcaacaacacaaatacccgaccaaagtctttaaggaaaggcaaaagaggctggggcacagtgggctcacacctgttaatcccaggcactctaggggggccaaggtggggtgggaccncttgagggtcaggg

SEQ ID NO: 8207 - DNA, 453 bp, Homo sapiens
  misc_feature (1)..(453): n=a,t,g or c
ttttttttttttttttcagaggtcaaatcacttttattctttaaggattcagtgtaacatccttttctttaataaaataattaaacactggcagaaattaacttattcaaaaagtcatactaatactttgttatgactttttatagaaaaacaaactttatttttttatttttttgagatggagtcttgctctgtcacctaggctggagcgcaatggcacgatctcagctcactgtagcctccacctcccaggttcaagcgattcccctgccttagcctcccgagtagctggaattacaggtgtgcgctaccatgcctgggctaatttttgtatttttagtagagatggggtttcaccatgttgggaaggctggtttcgaactcctgacctcaggtggattcacccgccttggcctcccaaagtggctgggattataggcgtgacagcctgna

SEQ ID NO: 8208 - DNA, 436 bp, Homo sapiens
  misc_feature (1)..(436): n=a,t,g or c
gatttgcatagttgtcactttattatattattttccttctgtgacctttccaagtctgaaacagtcccagggacttcttttggttagttatttgcaatcaccgaattgatccagtcgatgtaattggagacccgcgtgaagacggagggcttgtnggtagtagttgcagccgaggcgangacccgaagctgacgatgccgtgcacctgccaccggccgtcagatgcctgacagttcagtggcccgccagagtctccgttgcagctggagatcacgccatcacccccaagcacagatcatactggttttcacgctgctgccccaccaaggcagagctggagcaggtggcatagtccacaaccagcaaccggccctgctgcaggacatcaggaacagccccgttggtctgcagccttccccagcccgtgacgtagcag

SEQ ID NO: 8209 - DNA, 428 bp, Homo sapiens
  misc_feature (1)..(428): n=a,t,g or c
gacctttatcaataggacttattttaatgattaccattacagaaaggaggttggttaatccccaaagattccttatctgtgaaatgaggaaggttacaataagaatgtgaatagagtactaacaccaaggaagtgaaaatactaacctcaaactcccatgtaagcatttgggggatacgtgtagtgataagtacaaaatacacagtttaataagagccacccaaatagcaatctttatattcattccttatctcctttgcacatgaaactccttgttggttttaatcacctctacaattaatagctgaagaccctattngactactctttactatggatccaatttaattaggaagaaaaaaaaaggcagctttaaggggacaaatttatggacttaaaaatgggttattttaatggaagggcattag

SEQ ID NO: 8210 - DNA, 593 bp, Homo sapiens
  misc_feature (1)..(593): n=a,t,g or c
tgcatgcatgaaaagctttattaagtcaataagctgttacacttttacaaactgctatgcagagatactcaaacatttttaaatgacatgagaaactactaacatctttagtgagagtcactttcacaattttctctgctcccacacccctaatgatcaacatattcatttttttatttagtatatgtcacgcagcaatttatcaaaagcttttgttgtgaaaacacttttcttaaatacacaattaaaagatatgattaagcacttacaggatgtgaaatatttaaaggtaatacacaataatcgggttaccaaaaggaccgccttccaatttttctttctattcattttgatgttttgttcttttcaaaacattttctctcattacattcattactaaaggccttactttaaatacatcatgctacattttgttctcctcttcaaatgccaatgttttaacaatttgaantctctggcctgggaaaaagaaaagtnatccacntacaaggtanaccgtatggacaccanggatgtnacaggtccaacaacagcccaaatccaccatgtacatgtaacatagtgaatgagcc

SEQ ID NO: 8211 - DNA, 294 bp, Homo sapiens
  misc_feature (1)..(294): n=a,t,g or c
atgtaaatatttaaattttattcttaaatactatttattaatacagagaaatactcctgctataattttaagtgacacaatagtacaacaattgttaagaacaatccacctgtgtcaaagagacacatacacaaacacacatccatatacacatacaagcttggngaaaattctgaaaggntctcattgtcctagatggtggcattatgggcaattattttgcaaatgtcacccagtgaagaagcaatggtgcctttggaaagtatgtagctcttagttaagcttttatctgga

SEQ ID NO: 8212 - DNA, 511 bp, Homo sapiens; identical to SEQ ID NO: 2947
  misc_feature (1)..(511): n=a,t,g or c

SEQ ID NO: 8213 - DNA, 470 bp, Homo sapiens
tttttttttttttgttttttaatatgctttattctgcatattagtatcacattacacagtttggtcatggtatttgtaacctggagagaatactagtgcagtcggtcttcataccaccccattcacaaccagcttaaatggcagtatccctctgtgaactcaactacccctcctgtgggtccaggctgagctctacaggtcagcctcttcatctcagcccttctaggtcctgctgtcagggctgagctgtcacttcacttttttcccagagtagtgcagcatcctctctgaaacctgagctatcatgacattttcttttttaattttataatttttatatttctctaatttttgattttagagacagagtctcattatattgccgaggctgaccttgaactcctgggcccaagcagtcctcccacctcagcctctccagtagttgggactgcaggcatgcaccactgtgc

SEQ ID NO: 8214 - DNA, 567 bp, Homo sapiens; identical to SEQ ID NO: 5385

SEQ ID NO: 8215 - DNA, 435 bp, Homo sapiens
  misc_feature (1)..(435): n=a,t,g or c
tttacattctaagccatttattcaacgancctatagagtataagtatacccantacctcagactgcttttggcccctggactagaccctcattgctccaggcatgaggggctgtgcaccctgacagagccacccagggccagtgntgntgnaanatttgatcaatggctataaccgcttcatctgccgccgctcctgtcgggctgcgttntctcattgtgctctggtgctggggtgccactgtctgcagtgaaccaggggcccagcacattcacccacaggaggtaaagggcccggcctggagccagaagccagaaggaccagacatagagagagaagcagctgagcacctgcacgatggctgtcagtaggatcacatccttaaggtgcctgtggatagaaataaagctggaangacagcatatgggcctttcca

SEQ ID NO: 8216 - DNA, 588 bp, Homo sapiens; identical to SEQ ID NO: 2953
  misc_feature (1)..(588): n=a,t,g or c

SEQ ID NO: 8217 - DNA, 512 bp, Homo sapiens
  misc_feature (1)..(512): n=a,t,g or c
gtctcactctgttgcccaggctggagcacagcgttgaatcttggctcactacaacctccacctcctgggtttaggcgattctcctgcctcagcctnncaaatagctgggattacaggcacatgccaccacacctggctaatttttgtatttttagtagcgacggggtttcgccatgttggccaggctggtctcgaactcctgacctcaggcgatccacttcccgacctcaggtgatccgcctgcctcggcctctaaaagtgctgcaattacaggcataagccactgtgcctggccctatcccttttaattttctaagtgaccagtaataaacaatgatttgtttattactaggtagcaggagaaaaactttttagtcacttttccagctaagaatttcatttaaagatacctatgacatatcttgtggtactaagaatattagagaactggaaatccagtttttttgtggttttttaagaaagagaatctgactccattgnccagctcgtgc

SEQ ID NO: 8218 - DNA, 404 bp, Homo sapiens
  misc_feature (1)..(404): n=a,t,g or c
aaaaaaatcatagaaccataatttattttaagccctaaaatgaaattgtgaaccattaaaaatatgttgtaaaactatttaatgtcataaagagaactaactctgtttttatggtccatctaccaatgtcttccgagcagttctctctcctcaaacctcctctacctctttactcaccctcactcagcctaaccttgcttccgattttattaaggaaatccaatcaatcagaagaggtttctacaatttactatcacatttacccaccagccatcacctctgccatatatgctcctctcctattccaatggctggaatgtctcagggaagaccaagcccttcacttgtacattagatcccagctctctgtcncatccattatggaagctgcacatcancccagt

SEQ ID NO: 8219 - DNA, 290 bp, Homo sapiens
actctcactttgtagtggtatatttaggatttgatgtgacacagttatttattgctgagtgagcaaacccctagcccccaagtggggactacaggcttcagtgcttcccccacactgcctgagctaccagcccttctgcactggccctcctgccaatactgcctgcactgtccccactccctctggctcccatgatcaccagatccgccctgcaggctccctgtcacctgtggggccctatccagaccccctaatccacttgcctagcagccccactcttccctcgatgg

SEQ ID NO: 8220 - DNA, 241 bp, Homo sapiens; identical to SEQ ID NO: 30

SEQ ID NO: 8221 - DNA, 144 bp, Homo sapiens
cttttttttcactttgaaagaagctcaacattttcttctcattttcaataacttaaatgaacagcacttaacacattacacaaaattaaagacttgtgcatatatttgatttcaacattaatgtcaaaaatacatagtatgatt

SEQ ID NO: 8222 - DNA, 313 bp, Homo sapiens
gagacggagtttccctcttgttgccaggctggagtgcaatgacacgatctcggctcacggcaacctccacttcccaggttcaagcgattctcctgcctcagcctcccgagtagctgggattacaggcatgcaccactagtctcgcgacgttttaattagaattttagaattagaggagggctagaactctgccctcatttttcagtgaggaaactgcccaagacaggacaaatacttaccctaatgcttagcctggctccagtgaaattagctccccagccaaagctgagctggatggaactaacaaggacac

SEQ ID NO: 8223 - DNA, 248 bp, Homo sapiens
aagggaaaacattaattttattagaacttgaacaaatgtttcacaaagaaaacattttaacaaaatggtatggtggcataacaataacaaaaaagagaacagcaaaatgtgtaaaagaaatataaggtggaaaaattgttaagtatctcataatccagtgtggaaataagaagtctaaatttaaaaacaatgaattttaaaaagcataactataaaacaaaagttaatgcttgtgctatcctaaccac

SEQ ID NO: 8224 - DNA, 238 bp, Homo sapiens
atcaaaagtttgttttattttcaatacaagataaataccatgcttgttactagtgcagtttaaggccgacaatggccatatatcaaactgccgaacagtcacctaaatgctaaagaaaggaaagacaaagtaaacattaaacacaaaattgcaattacaaacattttaataaaatggaatgagctttttaattgaagctaatatgaagtctaattctcatggacagcaaaaaaaaaaa

SEQ ID NO: 8225 - DNA, 163 bp, Homo sapiens
aatcaaaaggattctttattatgtagattgtatcataattcatcaaaataattttataattaactgccatactgtcttataaatgatgccttctgaagttaaacataatatagattcagttttttaaaatgatctacttacaacatactaaacaaataataga

SEQ ID NO: 8226 - DNA, 247 bp, Homo sapiens
ttttctttttaatcactttattgcttgagtacatagacaaatttatgcaaccagggcgacgtgtagatggttcatatttccagctgggagggaggactcgcttggttttataatatcgagccagacggtgaatccggctctctatcagaatcagaaggaatttagcatccttgtcttttctgctcctctcaagatgcttttgaacagcgactgctttcttaattaagtggtagagatcttcagggag

SEQ ID NO: 8227 - DNA, 399 bp, Homo sapiens
atagtattatactttgtttatttaaccctggatcaatataggtatcaattcagaaaattcacaccagattggggattggtgggagaatggggaggagatgatggtcaaagggtacaaagtttccattagacaggaggagtaagttatgaagagctattgtacaatatggtttctacagtcaataataatatattgtagacttgaaaattgtagccggtcacagtggctcatgactataatcccaattctttaggaggctgagactacaggcacaccccactacattcctagctaaattttaaaaatctgtttgtttattgtagagatggggcctcaatatgctgcccaaggctggtctcaaactcttggcctcaagtgatcctcctaccttgtcctccc

SEQ ID NO: 8228 - DNA, 399 bp, Homo sapiens
ttttttttccggcactaagtcaagttctttacttcccagaagtgatggctaaggggagggaggagggtgagaagaggaagacagaaagagccagagagaatgaggaggtgagaagggggggacagtaaaccactgttctatgaagtctcacgaggcaagtgctcaaggtaaaaaaagagtcctggagaatcgtccacggctgcgggaagcatctcggtttccttctgcttttaagtcctctcagggaaggctgtcgccgctgccgctgcattaaatagttatgtacatcgcagagagtcccaggccatgggcaggtgggggaggggcgtcatttcaccaggggccgagttttatcatcgtcaccgcactggtgagctttgtactttttcacttctgcca

SEQ ID NO: 8229 - DNA, 468 bp, Homo sapiens
tagagacagggtcttgctatgctactcaggccggtcttaaactcctgggctcaagcgatcacttgcctcgacctcccaagatcctaggattataggtgtgagcgagccaccatgcctggccttaaaatttttttaacaactacctgtaagcactcaggacttagaaagtattttgactaatatttaaaattttaaagtttttaaaaatttcttttattcatagaaattaaaagaaaacaaatagcctcttattttttaaaggagggtaattctgaaactaatattttctatcaactacggctggtgatggtaaagttctatatattaatgttactttttcatatatatctctcttaaatgacactttggctttcgttctctcaatgtttatctctggggaaaatgtgattaagataatcagtattttagtatatatcaaaagttctaatataagttttcctcatagtt

SEQ ID NO: 8230 - DNA, 400 bp, Homo sapiens
tttataagtagttagatcattttataaaggatgaaaagacaactgcgaattttaatcttagaggtatatgcagaatgtttacatgcagtgtatgtatattcactatttagttccattttttaactactaagaaaaatagcaaatcacccactaactgcagaagagcaaatgtaggaaaatcagtatttaatgaaaagtctagccattctctaagcttgaaaatcaacgtttttttagcattgcacttaagggcaataatattacaaagtctgaatcttcatttactcaaagagaagaaattaaattgatgaagcccacttgattgcagataataaacagttattggcagtagattcttctactcatgttatgctttatgaaactgtccacctaagtccac

SEQ ID NO: 8231 - DNA, 243 bp, Homo sapiens
tttttggagcagtattcacattttttatttcgaggtgtaaaatatacgtggccaacattgttactttcatccacagatggaatagctgggaagtataaaaacctgtacatgacctttagtgaagattatttgtcatcaaattacccatatccaagtttccatgggcctggaatttcctttccacttgatagaagtatatattaggaagtccagttaataatatttttatttaaaaaaaaaaaa

SEQ ID NO: 8232 - DNA, 294 bp, Homo sapiens; identical to SEQ ID NO: 2974

SEQ ID NO: 8233 - DNA, 407 bp, Homo sapiens
tacaaagaaaatgttttaataaaatattcaatacagtatttccctgtgggattctagaagaagaagtgagatgctgaaggaagtgactgtcactgtggggaacccagtcctaaatgagacaagacttagctttccttcaaagacaccttgtccagctctgcccaacaggccgcaatgagatggaccaggaaaccttcaggagtcaccgacagacaaagcgaatgaactgaatccacttacaaacagatccacttaagcagtttttgcctcaggcttcctaccaaatgcagttatcatggagaccggagaaggctgatgtacaaaacgcattaacatgattttgttttttcccctcctattctatttgcatttccagagtgatcattagtaacacagcgatctgggtt

SEQ ID NO: 8234 - DNA, 401 bp, Homo sapiens
tttttttgagaatttttattttattttattttatttttttattattatactttaagttttagggtacatgtgcacaatgtgcaggttagttacatatgtatacatgtgccatgctggtgtgccgcacccattaactcgtcatctagcattaggtatatctcctaatgctatccctccctattttattttattttgaaacacggtctctcactctgctgcagtgcagtggcacaatgttggctcactgcaatcgctgcctcctgggctcaagagtttgagactagcaagaggttgaggttgtattgagccaagactgcgccactgcattccagcctgggcgacagagtgagaccctgtctcaataaataaataaatatctaaacaaaagacagaagatcttc

SEQ ID NO: 8235 - DNA, 77 bp, Homo sapiens
tcattttagacctaagagttttttgttataagacaccccagttaagaaatattgaaacataagagacttgaccatca

SEQ ID NO: 8236 - DNA, 576 bp, Homo sapiens
ttttttttttttattaagaaagcagtttatttcttaataactgaatgtatattattttacatataattaatgatcagagagaaataacagttgctgagaacgtaaatttatgttgtactttagaattgaacagatacaaccacagattcataccaaatgcattacttttagattattaacatattcttttacataatttcatttcacatatatggagtccaaccaagatacatctggcatagtaagttttcatcagtagcttcttgtataaggtaatgcacatgtccttcaatagataacggcagtcctgtcactctatttcgagtcttgattacaccttgtagtcgctgctcaatgtcaagaacaaggggccttggccttttcattggcaacttctccagtttcattcagtggggctttggaatgccctttcactggtttactccattccacaagaggatcatgtagaaaagtctttaagacactcattaaaggctctcgctgatcacgcatcagcctcattgtaacttcacatgctcttcgaaaaagaccctctgttcccataggacccattcc

SEQ ID NO: 8237 - DNA, 208 bp, Homo sapiens; identical to SEQ ID NO: 4555

SEQ ID NO: 8238 - DNA, 356 bp, Homo sapiens
ttttttttttttttaaattacccaatctcagatattctttattcttttatagcaacacaaacaggctaacacaaacatattgagtttttagttttccttgtgctaatttgccttattcttcacaatcacactacaaatatcgtcagtcctattttacacatctgcaaactgagagaattagcaattttgtccaagagtacgctagtgaagtggtaaggacaggatttgaactaagaccctgattccaaaccctttcgttttaatatggaggcttttcattcctgcttgagaagaggaatcaggacacagaggtagactattaattggcagaacagaggacctccctcctcccctcc

SEQ ID NO: 8239 - DNA, 531 bp, Homo sapiens
gggtagtggttaccatagcttttactgtagttattcattaagctattcaactgttctgtgcagtttgatgttttattttacaataaaaagtcaaaaaaaataagcaaaaagataaactggaaaataagacttacatctcatatatatggacaaaggaccaattacctccaaacataaacagctcctagaaattactgcaaagatcaacaacccagtagaaaaatgaatgaagttcccagaacagaaaacacaagtggcccttcaaaaaaatgaagagaggctcagcctcttatggtaagacaaagagacaggattttaaaaacctaggcctcttcctagagttcccttaaatatctaggccagatcatttttacttcctggcttagaccctgccaagggctgcccagctactcaggtgtttgtgtccttgtggactcaagtcatattgtcctgatcttttggctgagtacggttttctcctccagcaaagacaatttggaggatgtactaagcatgaagcgctacttcctg

SEQ ID NO: 8240 - DNA, 469 bp, Homo sapiens
tttttttcaaatacaaatatactattttattctaagggaatatttctgtggtttctgtaaggggaaaacctaaaagtggttaaaaactgaaaaagaacaaaaaggatgatttagatgtttttgtttgatgtttttttctcccctggaaaaaaaatgtaattttacacaattttcataaaattaaaaaagcaataatcagacgcacacatcaacagctacacttatgaggaatgaccaataattaatcaatattttctcttatgaataaatttagggttctgggcaactctgtggactaacatgcaaatgaaatcctgatacagtcatttatctgggtattgggtgttctcagtaaaagatacagatttttttttctggtatttcataacaatttatctactatgctaacaatatttgttttttcatacaactacagaaggggaaaatgttagtgtttatacaaaccatt

SEQ ID NO: 8241 - DNA, 355 bp, Homo sapiens
tttaaagacaatgaaaatattttattcgtgtatccactcattcgttcaacaaacatttattgagcagctcctatatgccagcccatggctaggcttgtgtgtccaaagaggcataaggttgagcccctacactccaagagtgctcagctattaggaaagacctatgcaaaaaacagtgccatcctttattacatgcagaaaacacagtggaagcactgccaacgggaggagagtatcactaataggtactttaaaaactatgtgttccaggggccccggatgcagagcttccagactaagaggtcaccaaagggaggagaaagagtagggcacttctgggaaataaaaagatgtt

SEQ ID NO: 8242 - DNA, 374 bp, Homo sapiens
cttttgttctcaacttgtttaatatggaaaaaggtcatcaaaacggtaggcagggttgctgtttttaatacattcttgggatgttggccattcagacagcattatttcaaatatagatgagttatccaactttttttgactcaaagatagtttgcttagattttttttttttgagatggagtcttgctctgtcaccaggctggagtgtagtggcgtgatctcagctcaccgcaacctccgcctcccaggttcaagcaattctcctacctcagcctcccaagtagctgggactacaggcatgcaccaccacacccagctaatttttgtatttttagtagagacagggtttcaccatgttggccaggatggtctcg

SEQ ID NO: 8243 - DNA, 417 bp, Homo sapiens
cgtgacgataaagctttttaatcacctaggtgcaggcaggctgagtccaaagagagtgtcagcgaagggagataggggtggggccgttttataggatttgggtaggtaaaggaaaattacaatcaaagggggttgttctatggcaggcaggggcgggggtcacaaggtgctcagtggggaagcttctgagccaggagaaggaagttcacaggttaatcgctcagttaaggtggggcaggaacaaatcacaatggtggaatgtcatcagttaaggcaggaaccggcccttttcacttcttttgtgattcttcacttgcttcaggccatctggatgtatacatgcaggtcacaggggatatgatggctttgcttgggctcagaggtctgacacacatcactaagcattgtttgatctgt

SEQ ID NO: 8244 - DNA, 316 bp, Homo sapiens
tttattaggataataattctgatgctttatttgtaggggatatgtctctaaaagggctgttcctcacagatgtctcaggccaccttcaattaaacccaagcctcttcctcttctactgaagcccctgtgagtaaagtccgtggaaatcatatagttctagaggctgggcagtccgagatcaaggggctgcatctggtggcagctttcttgctgcatcacctctgcctgaaaggtaggactagcagagaactccaccaagcagtacagtgctcaggttagaagcatgaaattcgaaaccagacttcctgggctccag

SEQ ID NO: 8245 - DNA, 291 bp, Homo sapiens
ttttttgagttcacgaagagtcatttaatgccttttatgtgccaagcactgttctaggcactggggacacagcagtgaaccaaatagcagtgcacacggagcttacgttgtagtagggagaagccaggcagctaacaggtagacagtaactaggtagccaccaagatggggatccggctctggagaaaggcatagcaagacagagaggctggggagaagtggggcaggcaggttgttttgtattatgtagaatggtcagggagcaccttaccaacaagatgagatttaatg

SEQ ID NO: 8246 - DNA, 371 bp, Homo sapiens
tttttttttttttttttttttttgtcttttaaaaaatataaaaatgttattattttaaaacatcaagcattacagactgtaaaatcaattaagaactttctgtatatgaggacaaaaatacatttaagacatatacaagaagatgctttttcctgagtagaatgcaaacttttatattaagcttctttgaattttcaaaatgtaaaataccaaggctttttcacatcagacaaaaatcaggaatgttcaccttcacatccaaaaagaaaaaaaaaaaaaaacaatttcaagttgaagttcagcaagaatgatgtaaaatctgaaaaaagtggccaaaattttaaattacaacagattgttcaatttgatgg

SEQ ID NO: 8247 - DNA, 204 bp, Homo sapiens
taattattcaaattttttttaatttaaaaacaatacaagctgattatacatttgacaaatacaaggaatttctgactgcaggaaaaaacaaagcatcaactacaaagrgaagcagaaattcttcttgagctgctgattttactatacatttgggctatatyyytycttaagvcaatcactamaaagtaataatataaccccctt

SEQ ID NO: 8248 - DNA, 161 bp, Homo sapiens
gatcaggctgctgagggaataaatttaatcaaggtctttgcaaaaacagaagcacagaagggagcctatatagaactaacactgcagacttatcaagaagcactcagtcgccattctgcagcttcctaaaaatattttaaaaatacatttattttactaaa

SEQ ID NO: 8249 - DNA, 428 bp, Homo sapiens
atataaatacatttattggtggtattcctgaatgatgaatgcagagaacagaatacaaagragtcagcacataaaaggratcattaatctttaaaaatgctatatacttacattttgmccmattttgcmtatttgtttagrtttacaaacaaatgtaaagctaattccaaagttttctyctgaatatacttcaaatttgaattgtagtgttctccattccaaagccagctgtttttttgctggatttacaccaactatgatttactttgtttgtatctaacctaaaagcaagactctgcaagctgatcctgaagcagccagttactcaggaattttacaacagctattaaagagaggataaagccacatgaaagagcaagcctcaatactagatacatagatacaagrgaaatmccaaggagcaaaag

SEQ ID NO: 8250 - DNA, 317 bp, Homo sapiens
aagmcacatctatttatttataatcaatccactgtgtataamggratactatcagamggcaagtataagccctaagkgctaccaacacttatgttggkacactttgtatatcacactttgatacaacactttgtatcggaatacagagaaagavgaacacatcccacagtgcataaataaccatatttaacacctctcaaagactttgtatagatcaggcaggttagcaagctkcaggwtatttccatcttctgtgaaatktttagggggcagaatgtgtgagcscaaggctttatagacaatgtgttccmcagtcc

SEQ ID NO: 8251 - DNA, 396 bp, Homo sapiens
attgctgaacaccaatatgtcactttattatttggvtttybyttcccatttgtcacatacctgtcaatgttacacaatgrgggaaatcaaccagcattggaagcaactgaccaaatcagttgataattctgtaccctcttaacacacatcaattttcacttggtagggattatcttaatycggtctcacagctattcttaaaattggtgtcaagattgycacatctttaawtacagwtagahttgccagargtacatawttatatatvtctvbsccacatacagaaamtacaagactgtttcccacaatatttaatttatacactactgtaactatatgcmccttttgaagacaggttaagggghacaagtactktttagrgcaagwaagtagttt

SEQ ID NO: 8252 - DNA, 333 bp, Homo sapiens
gaaagctctcaaataagcsattttattcctatccatgattgcagacatttacaaaaccataacatctgagttcaccttaaaaaataacttatataaagcagtgatatacacagcacaaaatasttcasggagggggcaggvgcaacttgtaataattaaaatgtaaacgtgaaaaamaggwtggawtaaaagtccctacttatttctacttaagatgtcatgtgataatatttyacaatgtcctgtgggtcatgtatgtatgtstatatstctgtataacatacacatatacagtacattctctctcccacacatatacatacacacatattt

SEQ ID NO: 8253 - DNA, 224 bp, Homo sapiens
  misc_feature (1)..(224): n=a,t,g or c
acattaagcacaatacagcaatttatttagatgcttaaaatgaatacaaagggaaaataaagatcacaaaattatacatactacaacagtgtgtcatatattagatggtataaatgantccaccatgatggtgttgaactaaagataaaactaantatccaaaatncagcactcattggtttnctgcttcancacaacacacttttatacagntctaaaaggtg

SEQ ID NO: 8254 - DNA, 349 bp, Homo sapiens
ggtcattttatttttattacaacttcattatttacaaaaccccccatccagatatattcacgttaacaattctgagataactgctgcatcacagttgcacaaaggctgatgagttgcaaatgttcatcagcaccatctgctaggcatttgtcaacttcggcaagtttttctgtgataatagacttctgtttatcagataagttattttctacaaccacatcatggagttgattgacgagctgagttgctgcatgaccctcatctattaaatccttgaccacagcttctagtttgtcaaaagagccactctgacaggcagcaaatactccatcaattttctcagctgggt

SEQ ID NO: 8255 - DNA, 386 bp, Homo sapiens
  misc_feature (1)..(386): n=a,t,g or c
cataaaaacattttattcacaaaattggtcatcacagcattatttacaatactgnaaatctggaaatagcctaaatttctaacaattgaaagaaggttaagtaaattataagactacacaataaaatatattaccagcaatatatctttgtgaaaatctataataaccacacataatacttagtaaaaaagcancataaattacatgataaagcactatgaccagnancaatgncaaaaaattcacacccccaaaaaagnacaaggatattatatgggcaattttgtgggtaaaatattacatgttatttgtgnctggcatttctaattttccccgttaactggacacatncggttttcntaattagggggaaanaaaattacctt

SEQ ID NO: 8256 - DNA, 443 bp, Homo sapiens
  misc_feature (1)..(443): n=a,t,g or c
tccatcatccttaaattctgttaccaaataatggctaatgttacaaaaagttatactccagagacccaaagcttgacatttacctaatgtatgagaaaatattaccaattaacaataaagaatgatcatatttttaacctcttttacatagcctaataactcagcaaggcctcaacgtctgtgctaatttaaactgccaaatattgactgcagcaaacaagaattatattcagaatttatgagggtactgttaggngtatactgcttacaggtttagatatagtctgttagagttaaaaccaagtttaggtgttcatatttacctcatgggctttatcaagcccatattacctcagcttatatatagttaccctttttagggttttaattgtttggcccntgggtnggtaatggcagtcttttnttcttcaggggcttaaatt

SEQ ID NO: 8257 - DNA, 438 bp, Homo sapiens
  misc_feature (1)..(438): n=a,t,g or c
ngaaaatattatatgtaatgactgtagtaaccagtttattacacagattaatcattcttgaaagtacaagctccagaggcaaatttgggtctttaaatatacacaagtatttccatcaaatgaattttcacccttacatccaaatagacctaagcggttaaaaacataagaaaaataagagctattagctatgtattaactgagaaaccacatacaaaccaaagantatggnngagagaaagaagggctgaaaggccaaaggttgaaggggtagggagatgtaaaagagttggggnacaaagcccatcacacttgatgtactaatagctccaatccntttaaatgttgaccngttaaacttagaccttaaaatgcnggatgtggggtagggtttaatctggttggtcataactttcacctaggcgtagctccttcggg

SEQ ID NO: 8258 - DNA, 432 bp, Homo sapiens
  misc_feature (1)..(432): n=a,t,g or c
aatttatgattttattgtcttncctttgtccggcctttaacatgtttctgtaatttaaataaaaatctatttactttctccattttagcaaatggtttctttacccaaataggttgcactatagtccccatatggttttctactgtnccacaaccactatttcacaaagattgacaaaactttaataaaagttaaatttacagacatcttaagataacttgggaaatatgtaggtaaaaaagaatcgagtccacaanttaaggantatttngnctaatatgcccaacaccantttcaggcaaatccaatctacttaactcatatatttnatgtgggggaattttncctaacaaantttangggggggtatggaatggntatatttatggcccttggacaaggtggacngtgtggttttgttgtgacagggag

SEQ ID NO: 8259 - DNA, 245 bp, Homo sapiens
  misc_feature (1)..(245): n=a,t,g or c
agtaaaatccattgtagttgcatctggattgaagagctttaatcaaaaagtgtattgcaccacagatgaatttgctacagcagttttcaagaatacaatccctatttacaacatggnaggngagctcaagatccatcgctcgtataaagggctatagataccgtcgctaacacagaaagttttntacaagtcaaagngcattaaatcacttngnntatttattccactcttcctcttaaagctga

SEQ ID NO: 8260 - DNA, 393 bp, Homo sapiens
  misc_feature (1)..(393): n=a,t,g or c
ggtgtccgcgccctgggcctcggagcgcaggcgntccccgaacctggcgtggaaccccggcatcgcctgcctcacacctggggtgtcggcccagccaggatgcatggaagaaaaatggatggccgggtgcccttgggccaccgctccgtcagaaccacttgctgcctctcactgaccttgttttgtgcatagaccatagttccatcaaatggtgttctttcggactggagatcattggtgttcagtttctgaaccaacattcctcctgaggagacggttatcactcgggggtngtgttctttctccagcacaggggatcagggccggtcgtgagaatgtacacaccggagggggcagttccctccnttccgagggatcccttcaaggccaatg

SEQ ID NO: 8261 - DNA, 381 bp, Homo sapiens
  misc_feature (1)..(381): n=a,t,g or c
gctgctaaatnttgtctttctttattcacagatgatagtcaatgggcacaacatataagtagttacaatgaaatgagaagcaatatagcagtcaggctatatgcatgatttaacaacaaaattatcacttccttttaatttagaataagggacaatttaaaaagcatctcttggccctatcatttctgttccagtagttagtgttcatatgtgaatacnaagttttgacattcctttctcccatagaaccattttggtgatttggatggtggccactacactggctttctgcaagaattcagtcacccaggcctgatatagccttggataacccacgagtcngtgagattccagatacttcnggttccaaaatggcnatgg

SEQ ID NO: 8262 - DNA, 443 bp, Homo sapiens
caagtttgctattgtatcagaaacatatcttttagtattaacagtttccaaaggattatgtcttccacattccttatactgatagatttccccttggctatgatttccctgatatgcaaaacagttccaatccatggtgacatgtatatacattcttaatatttataaatttttacttgtctatagtctagtattgttataccatgtggtcttgttataatcatggtttccattctgtgagtcttcagattatgagtccaacacacaaggggatgtccacactaacctgtgtgaactctctgatgtacaaggtgtttgacttcaggcaggagtttctgattcactatactgaaagggttctctgatataaaatgaggtctgacttcagagaagccttcccacatctattacattcatattgcctctcctatgaattctctgag

SEQ ID NO: 8263 - DNA, 390 bp, Homo sapiens
  misc_feature (1)..(390): n=a,t,g or c
tttttttttttttttgctgcttaaaaaatgcattaatgttactgctttattcacactaattagaatacatacacaaaaaatgtgtatcatatatcactttcaaaaatttccatgttccatgagaactatgtaaacaatgcaaaatgtttccactacgtaacaaaagaaaatcagcattcccacatagtattaggaaaatatttggataatctgaatttatagtaaaacaaagtgatctgaatttgtagtaaaacaaagtgaaatattacaaagcagtcttgtcatgaagtagccttatataactcagaagcaacacatttcatactttcaaacactttggtataagtgaaattaatagnaaacaaaaagaagaaggaaaaaaacctctac

SEQ ID NO: 8264 - DNA, 472 bp, Homo sapiens; identical to SEQ ID NO: 6296
  misc_feature (1)..(472): n=a,t,g or c

SEQ ID NO: 8265 - DNA, 476 bp, Homo sapiens
  misc_feature (1)..(476): n=a,t,g or c
cttttttgatagtcatttattttttttataaggttgaacacttagaaatatgaccaatgacagattaaattcacaataatcattttttacatatgagactttcatgcactagagattaaataagccctgacatcaaaagcaataaaaactcaataaaaggaccaaaacattagagcagatagaaaagacagcaagaaacactttaagaaaatgcttcctaataagtttattttctatttgtttgaaaatacaatgaagcaaactgtgtaaattcagttaaattactcaagaaaattaaagctggaaataatcaataaacatttctagtaaaccatgtacacagtaaacacattcctcactttcactggaacagcagaggcaaccggtttctaagttccagccactctttcatagagctctccaccttgggctgacagctaaggatttctccagcgcacttccntccccaaattcat

SEQ ID NO: 8266 - DNA, 476 bp, Homo sapiens
  misc_feature (1)..(476): n=a,t,g or c
aaaattttctttttaattctcagcaagacaacgtacttctatagaagggtgcacccttacagatggagcaatcgtgagcgcacacttggacaagggaggggaaggggttcttatccctgaggcacgtggtccctgctgctgtatggttcccctattnggcttgggttagactgcacaggctaaactaattccaattggctaatttaaagagagtgacagggtgagtggtttggcgggaaaaatggttacagggcagatcaggaaatcagagtaagccagggtggagaatgagcaggtaatcagaatgagtcagggtggagcaggtaatggaaaaaggttgctttacgaggaagttaagtttaacagtagaaggcaaagaactgaacatactgacatattgattcnttgaagagaaatttagaactcatacctaacagtacctngagaatgtgcatgagccattccctccgcctgaa

SEQ ID NO: 8267 - DNA, 404 bp, Homo sapiens
  misc_feature (1)..(404): n=a,t,g or c
tttaagctgaatgcgcctaaggagggcactgtttaatgacatgtggtgcagccatgcagtgaaatattacacagcagttcaggcctcaggggaatcggatgagagactgagatttgctcgggaggtttactggggggaacactcaggaccaacacctggaaggatgtggaagaaggagaattgagtagctgcggttaggcctcagctcatcatactgagagctggtgggcctttcagaggtacctgcagggcaaggagacaagacctttttacccctgcgtcggtcagccactggagcatgtgtgcctgggcaggggctcagttgtgagctgtcccagcagcagctcggggaatgagtgcctcatttgctgaaggggatagtagtggtctggangcaacaaaac

SEQ ID NO: 8268 - DNA, 486 bp, Homo sapiens
tgcagttcttttatcggtcaggatttctttaagtttattttttatttcatcctggcgattccgtagcttttccacccgtcggtaacactctatctgctcatcgatctccccaatctggcggtccaaccgtccctcctcatcctcttcggcaactatggcttccggaaatagtgttgacctgcctcatggctttttggaattcgtcccactctttgtccatctgatcttttggagcatcaacctttcgtactcttgcatctacctcagggtcgtcaaaaaaaccttccggtaacgcttccgcggtgttttctctcctttccaccactttttcatgtatttctgctttctcaattgaccctgaatgaggaattatggggggccttgggaggattagtactaaagaaatcgtttgggcagcacactacttgttacctcccgtgaaagaggaaactgagtgctccttgccctgtgcgtcggagaagcggg

SEQ ID NO: 8269 - DNA, 219 bp, Homo sapiens
cacggtctgtacagtttatacacagagatagggacccggcctgggcccgaacccctacaaatatagatcctctctacaaaatagagataatttagcccccccatagcagctgttggggggggaaggggagggcacaggaggaagggggagactccagctcctgccacccctcacgggtaacagagggcaggggcagggccggcggggacatgaaggcac

SEQ ID NO: 8270 - DNA, 447 bp, Homo sapiens; identical to SEQ ID NO: 3265
  misc_feature (1)..(447): n=a,t,g or c

SEQ ID NO: 8271 - DNA, 210 bp, Homo sapiens; identical to SEQ ID NO: 203

SEQ ID NO: 8272 - DNA, 218 bp, Homo sapiens
taacaagtaaaaacctgcaaactctttattaaattctcccatttcatctgtacagaaaaaaatgcacattatgttcagaacatatctcagtaacatctcaaaattacacagcatgaacatgtaaaaacaagggaccaccacgattttatacatagaaaggaaacccatttacaaaagaggcttgttaattgtatttttttctttctttcaaaaacaaa

SEQ ID NO: 8273 - DNA, 325 bp, Homo sapiens
  misc_feature (1)..(325): n=a,t,g or c
ttaaaaatanagtggctttatttccattgtttatagtccccagtatcccatctgataagaaccttcaattctataaacaaaaatatttcaagaaagtatgttacacaatagtacatataagtaatagtttggcagaattttaaactctagtagttcatacccccaaaaaacaaattttaaaattcaaaaataacagttttatttaacatatgttacaccttaacatttaaaatatcatgctctaggttaaatatttcatcaacaacactggtatacaaataaaatattacataaaatatatttaagggaaatgttttggggcttt

SEQ ID NO: 8274 - DNA, 464 bp, Homo sapiens; identical to SEQ ID NO: 3502
  misc_feature (1)..(464): n=a,t,g or c

SEQ ID NO: 8275 - DNA, 168 bp, Homo sapiens
tttttttttttttttttttttttgaggctcacaaagaggcctttatttatctagctcaaagtagacactatcacaatcttgtttgttactccttttactaaaatagttcaaatcaatgtttttaccacactatcaaaaagttctatttcttcttgtctccccacggtc

SEQ ID NO: 8276 - DNA, 301 bp, Homo sapiens
  misc_feature (1)..(301): n=a,t,g or c
ccagttccactttttttttatttaaataaccgaagcaacagncgtggcacagcagagggaagntgggttggggcgtntgagaggtggcagcagtntggcctnatggggggantaggtcacagtgaactccccacacgnctntcaggttcagcagtcatggccataggnttgggagcactacggaggagccatcagttagtgatgtctctccaagtcccagagaccttagggacgggagctaagtcagctccctcaagtagcagggccaggggcatcccagtcagggggtcacggnggcccc

SEQ ID NO: 8277 - DNA, 430 bp, Homo sapiens
  misc_feature (1)..(430): n=a,t,g or c
ttttttttgttcaataatagttttatttacttatttcactgttaacttggggataatattcaccacaaagttgcaggcatcattttatagtacagactacagacgattgactttttcaagattaaaaatgaacatggtttgtgacacacctgaaatgcctactgaggaagtgctggccacgaggtaataaaaaaaggtaaaattcagtgcctttggaaagnatgtgggacactgttttaggatgcgagtatggatacatgccctttgcttacaaaggcaaatatacacccatctgtttttgggactgcggtttctctatccaccagaggaggcatctttaaatggattcacggacatttccctgaggagcttcctggccaggnggaaatcggcntggtggtttncaccatcgtggggaaggccctttttt

SEQ ID NO: 8278 - DNA, 278 bp, Homo sapiens
  misc_feature (1)..(278): n=a,t,g or c
nctanctttccaattttatttagattttatgtgctcacatatagacacacttaaagagcatacgtttatatatacatatataaaatatagatgatatgggagtttctgacaaagtgatttattaatgaaaattcattcactatataacctttgaataccagaggaaacttcaatatgtacaaatcaggcatganggttcccagnttctcaaactttgggntatatggaatatggcctcaaggcaccacaaaagganacattaggtccctaatttaaaa

SEQ ID NO: 8279 - DNA, 249 bp, Homo sapiens
  misc_feature (1)..(249): n=a,t,g or c
gatccaaacaatgtttttttttttttgntagtttgtgtagtaattttactgcataagaaattacagagattgcataaatcattaggtcaacagcatacagagaagaacaaaacaaaacattgtttggatcaaataaaaaacagcaggaacaactcaattcttaaaaataccacgnnttccccgantgtggctccatttgntagaaanttttgcattttctggntaatgtctgtagttacattaagcaaa

SEQ ID NO: 8280 - DNA, 299 bp, Homo sapiens
tttaaaacaccagtttataatttttttatacattcagttgttcaacaaatgattcttttaatctgcctgaagtttcaagtcaacacgtcactggagaaaatgtatgaaactgtagcactaatttctgaaacgaaggattgaagttcctctttccaacttctttcagaccatcactactccacatgttcctgctcttgtcctggaattagccaccgaatactctcagttcgaatggtagcatacataataaaactacttaaaaagaataaggaaaatacaagcaaccagtccacactttt

SEQ ID NO: 8281 - DNA, 199 bp, Homo sapiens; identical to SEQ ID NO: 5979
  misc_feature (1)..(199): n=a,t,g or c

SEQ ID NO: 8282 - DNA, 370 bp, Homo sapiens; identical to SEQ ID NO: 769
  misc_feature (1)..(370): n=a,t,g or c

SEQ ID NO: 8283 - DNA, 153 bp, Homo sapiens
cttgtagctgtctcaaggcatttgtggatgagcccagttccttaaatatgacaaaggcctcccccttcatcttcatggtctttaaagccacaatgtccaccacatgaccaaactgagaaaacagggcatatagggatctcttcaatctcgtgc

SEQ ID NO: 8284 - DNA, 290 bp, Homo sapiens
aaacaatttccttcattacaatttaatacaatatttattaactattagttttgagaaaattatttccctctacatacaaaaatacagatttgaacactatgaaaaagttcaagacaagtaccatgaaaaactggtccttcaaatgaaagggggaaatttgagggcaatgtgaggttttgctcgttgtcggggacaaatcattagcagcaaagctttggggccccaacccactccatacatacagttttgaacccaaaagccaggccagccaggggacgcccacccagggt

SEQ ID NO: 8285 - DNA, 203 bp, Homo sapiens
attgattcagatttattaatttactaattgatcaccctacatttacaggtgttagagtagatatccttaagaataaacataccttatagaaactttaatcagcctgggcaacacaatgagaccccatctctacaaaaaatcaaaaatggctgggcgcagtggctcacgcctgtaatcccagcactttgggaggccaaggcagg

SEQ ID NO: 8286 - DNA, 599 bp, Homo sapiens
  misc_feature (1)..(599): n=a,t,g or c
ntttaagaaataagaaaatttattagatggattatcaagcagtagngaacatttttgggagggaaataagaaaaacaagtgtgacctcatactgggttctggttagaacacagccactagaacaaactccagtctttttcagtctgttgctgtacttcagatttaaaatctgggaatgagcatgcagcaatgctccaccagatgaggaagaaaagctgttaaaaggaactcaggatgttgttaggaagggggagtggatgccaggccttcaccagactatccagaagccattccatggggtatttggtctgcatactgtgagacactgagctggttccaacacagcccctgctgtcaccagggtacacagtcaggccaaggaacagccacggaaatggggaaaaccagggntgagtnggagatgtgacttggggatgtacagggggcttcggggagcaccagagggagagacttttcctcccagcttttnattgggaattnaggttccagggtacttngtttaggggaagacaggtcttcttggnagagattgacacctttnaggatgaggttnaaattccccacattccttcaccaat

SEQ ID NO: 8287 - DNA, 182 bp, Homo sapiens
  misc_feature (1)..(182): n=a,t,g or c
ctgagtttgtttattgttctgatttactgaaantntaaatattccatcaaattatccagggaaatccaggtggcagaaatatataatatgccatttcatcaagaggtctcaaataaattttaaaaggccagaaaatgatatatatactatgccntttaaatcacttctntcttctgtnctta

SEQ ID NO: 8288 - DNA, 493 bp, Homo sapiens
  misc_feature (1)..(493): n=a,t,g or c
tttttanaataaanactatattttttaaatattttncagtttatttaaatgtanttncagaactattccngcataagttataattcagacatccaaattcaggtaattgcctcttgggtaataagacaaataatgatagtctcaacagaaaaaaagcagctcattagtatacacacagattctaatttgcttcattatttagccatctttgccacaaactacctgctaacagttaaanttctgacatggacacgttttagttgagaagttcanttttgcaaagantttaattttaaataaataggantccaaatatgtcctgcttcatgttttntttcataaggcaggatttngggttttttggatactgtaaantttttaaaatgcaaaantgtggntacaggtttccaggggtnacctggnatgcctggngggttcttcccaaagggtaggctgggggnattagggggggccccaaaggtccccatgggnc

SEQ ID NO: 8289 - DNA, 394 bp, Homo sapiens
  misc_feature (1)..(394): n=a,t,g or c
tttaaattcagtagctttatttttaaatttcaattagggtcccttggatgaacaagaaacaaagtgtgacattttatgtggnatctgaaaaccacccttagnatggctttacatcggatgcatcagttttccaaaaagccagagaactgtgttcccttgaagcatttggggacttcgatagtgccatctatacactgagcatcctctgtatagctacacttcttttccttatttttgcagaaggaaagaaactttatcacccatgtaggcattcccattccttaaatttttccctggaatcctttactctctctccttggggacaccacagtgggcttttttcacaggggacctttaccaaggatgcctttaccaancttgggccntgggcagg

SEQ ID NO: 8290 - DNA, 476 bp, Homo sapiens; identical to SEQ ID NO: 6343
  misc_feature (1)..(476): n=a,t,g or c

SEQ ID NO: 8291 - DNA, 560 bp, Homo sapiens
  misc_feature (1)..(560): n=a,t,g or c
tttgcattttgacagcccaaattttattttacaaaccaatgacagctactagaagatgctttaggaaaccttagctaagccacataaacaatcagacctatacaagtacagaaaaatctaaacatgcttcagaactaaaaaaaaaacaaaaaaaacaaaaaaaacaaaaaaaaaaaccaagttgtacgtcctgagggcatacaacttaatttctacaaaaacatactttttcaaaagggctatgagagtatcaattgacaaaagcagaacaagtagcatgattagacagagaagtcttaattgcttaacacaagataaactcagcagttttaaagtgtctgtatccattttaaatgattagtccaggggtagaaaagatgagggatgggttccatcataccttggaaagggaactccccctgggggcctaaaaccaaacttaccgtccagggttattaagaatcccaggttacntaggtaaattttttacncattattttcnatacccagttcctggcctagggccanaagaaaatccctgnttggnggctttanttctt

SEQ ID NO: 8292 - DNA, 425 bp, Homo sapiens
  misc_feature (1)..(425): n=a,t,g or c
tctgtagacaggatcttgctatgtcgaccaggttggtcttgaactcctgagctcaaacaatcctctagcatcagcctctgaaagctctgggattatatgcatgagccaccttgcccagcctcaataaattttagttaatattctttttgtttttaattaattaattttaaaagccagggtctctctgtcacccagactggagtgcagtggtgcaatcagctcactgcagccttgaactcctggacctaagcaatcctcccacttcagcctcctggtgcacaccaccatgcctggctaactaatgtttttactttgtagagatgaggtctatattgctcaggctcgtcttgaactcctgggcctcatgcgatcttaccacttccancacctaaaagtactggggattacagatgttgagccaccgc

SEQ ID NO: 8293 - DNA, 423 bp, Homo sapiens
tgcatttaacattttattgagattctcaacagctgccatttggtttgtatagcaaattttttacaaagtaacttttttccatttttgatatttttatgaaaattattttcttcagttttaaagccctgtccctcccccaaagaaggattaataactaccaagtaaggattatttaggagaaaaacaaaagcaaaaacagctttataaacacttgtgaaacaggggtaagtgtccgaagtcaagaccttctgggcccagtggaggtgctgggctgctccaggacaccatcaccacttcaccatccacaacatcctcaagagcttgagcagccctgcacagaccctgggggggcttcctgttccacaagctccactccctttttcctctccatctttggctgttgggcctcccctccaaatctgg

SEQ ID NO: 8294 - DNA, 409 bp, Homo sapiens
attttggttagtcataaattctgtacttcattaaagaagtaaatgctttcttaattttaggatgtctggagccaggattgttggtcatttgactcatgccttgaagcaaggagaatacggtcttgccagtttttgcaatggaggaggaggtgcttctgccatgctaattcagaagctgtagacaacctctgctatttaaggagacaaccctatgtgaccagaaggcctgctgtaatcagtgtgactactgtgggtcagcttatattcagataagctgtttcattttttattattttctatgttaacttttaaaaatcaaaatgatgaaatcccaaaacattttgaaattaaaaataaatttcttcttctgcttttttcttggtaaccttgaaaagtttgatacattttt

SEQ ID NO: 8295 - DNA, 1215 bp, Homo sapiens; identical to SEQ ID NO: 3069

SEQ ID NO: 8296 - DNA, 3269 bp, Homo sapiens
ggtcgtctcgggtgaggaggtcgcgccggaagtggctctagccgtggcgcttcggcgtagtaaggagcctgcaacagagttttgttgtttagggggcgcggcaccgcaccgctcccttcaccttgcagcagccatggcgaaaggcagagtcgccgaacgatcgcagttgggcgctcaccacacgacccccgtgggggacggggcagcggggacgcggggtctcgcggcgcctggcagcagagaccaccagaaggaaaaatcctgggtagaagctggatcagcaagaatgtcactccttatattggtgtccattttcttatctgcagcttttgttatgtttttggtatataaaaattttcctcagcttagtgaagaagaaagagtgaatatgaaggttcccagagatatggatgatgccaaggctctaggaaaagttttatccaaatacaaggacaccttttatgttcaagtacttgtagcttattttgctacatatattttcttgcaaacatttgctattccaggctctatatttctcagtatactctcagggtttctttatccctttccactagccttatttcttgtttgtttgtgttctggacttggtgcctctttctgttatatgctttcctatttagttgggagaccagttgtatacaaatacctaacagagaaagcagtaaaatggtcacagcaggttgaacgtcatagagaacatctcattaactacattatatttttgagaataacaccatttctgcctaattggtttattaatatcacatctcctgtgataaacgtgccattgaaagttttttttattggtacttttctaggtgttgcacctccttcttttgtagccattaaggcaggaacaacactgtatcaacttacaacagcaggagaagctgtttcctggaactcaatatttattctgatgatcttggctgttctttctattctgccagccatcttccaaaaaaaactaaagcagaaatttgagtaaaaataatcatctgatttttagttttgctgtcatcaccatctcaggattaacagatgcatccatttatgttttaaaatcacctcttcagtaattaaacaaggaatttgtaaaataaaatttcctatcagatagttaaagtaatacatttaagtgacaaggggagaagaaagtaaaaatggaaattggtatactgtgaaaagtgctatcaatagttaaggtagacatcttagacatcttataaattattataccaagggtagctgtagataatagtagtgtggtaggaaattgttgatccagctaattcattcaatttaattgaatattttttatctttaataactaaaatagatatttttaaattctagattttttaaagtagtgttgcaggttttgttaatgttaggcttttttcagagcataaactggaaaacttaaaaagagatttacattttcttcctctttttttttttttttttttctgttttgagacggagtctagctctgccgcccaggctggagtgcagtggcgcgatctccgctcattgcaagctccacctcctgggttcacgccattctcctgtctcagcctcctgagtagctgggactacaggcgcccgccaccatgcccagctaatttttttgtatttttagtagagacggggtttcaccgtgttagccaggatggtctcgatctcctgacctcgtgatctgcccgccttggcctcccaaagtgctgggattacaggcatgagccaccgcgcctggcccattttcttcctcttttgaggtaatggatttgtttggagatggcatgttagtagacgactgaatatggaaaggatatcgagttatctattttgttaattttatttttgttttttatcatctagatttttatcatggattagtctgaaatttaaagttctggccagtcggttttctttcatcttgtagtttttacagtatttccactgtgcatatgcaaaatgggtattacataactgtatcatatttggtattgataattttttttttttttgagacggagtcttgctgttgcccaggctggagtggagtgcgtggtgtgatctcggctcactgcaaactccgcctcctgggttcaagcgattctcctggcccagcctcctgagtagctgggattacaggtgtgtgccaccatgcccagctaatttttgtgtttttagtagagacggggtttcaccatgttggccgggctggtcttgaactcctgacctcaggctatatgcccacttccacctcccaaagtgctgggattacaggcatgagccactgtgcccagcctggtattgataatttatattcagataatttgttatggctctttaatatcccacaaggggctctaaaaagcaaacattcaagagtatgtagtttttagacattaagttaattattttaaacagtgacagcaaaacacaagtgattaaatatagtttatttgttccaatgactaaattttacctcatttattaatctggtcattaaggaatatatttaataatattatgtaattattctttttatgcatgatacacctagaaaaatgccttttgtttctattgatggctttgttgtttggagctacttttgattacttattgcagtttcccaatttagtctttactttatctaactcacaaagtaaaattaactgatcacatggcaactactgtatttaaatagttctggaaaaatgaaagtgctttttgctgcttggtaaatgggtaatgcccttgattccttgactgtaggacatagctgatctaaagtactctgtcagttttaccttcacccatgactgtcattagttgtcaaagttgaaaagtactttagctgtgagaaatccttgtatgtttttattataagaggtataatcatcctcaaagcctgtttttattacatgatgtggactgattattttttctatcacagtgttaacagatggattttattgtaaatacaaagaaaacatattgattattgtagtattcttatgtcacctggccttttgcgtgaggattatttattatttctagcaaggctttcttcctttcttattgcccagagactgactgatacatcttttgttatttttacacataaattaaacatagcctttttggacaaattcactaaatattaatgtataaaatgtaattgagtaaatttttatcagaattttaaaaataaaagagcttagactcagtaggaactc

SEQ ID NO: 8297 - DNA, 1685 bp, Homo sapiens; identical to SEQ ID NO: 3011

SEQ ID NO: 8298 - DNA, 4441 bp, Homo sapiens
ctctgaggagacactttttttttcctccctccttccctcctctcctcctcccttcccttcccctctcctcccctctctcctccttcccccctcggtccgccggagcctgctggggcgagcggttggtattgcaggcgcttgctctccggggccgcccggcgggtagctggcggggggaggaggcaggaaccgcgatggcgcctcagaagcacggcggtgggggagggggcggctcggggcccagcgcggggtccgggggaggcggcttcgggggttcggcggcggtggcggcggcgacggcttcgggcggcaaatccggcggcgggagctgtggagggggtggcagttactcggcctcctcctcctcctccgcggcggcagcggcgggggctgcggtgttaccggtgaagaagccgaaaatggagcacgtccaggctgaccacgagcttttcctccaggcctttgagaagccaacacagatctatagatttcttcgaactcggaatctcatagcaccaatatttttgcacagaactcttacttacatgtctcatcgaaactccagaacaaacatcaaaaggaaaacatttaaagttgatgatatgttatcaaaagtagagaaaatgaaaggagagcaagaatctcatagcttgtcagctcatttgcagcttacgtttactggtttcttccacaaaaatgataagccatcaccaaactcagaaaatgaacaaaattctgttaccctggaagtcctgcttgtgaaagtttgccacaaaaaaagaaaggatgtaagttgtccaataaggcaagttcccacaggtaaaaagcaggtgcctttgattcctgacctcaatcaaacaaaacccggaaatttcccgtcccttgcagtttccagtaatgaatttgaacctagtaacagccatatggtgaagtcttactcgttgctatttagagtgactcgtccaggaagaagagagtttaatggaatgattaatggagaaaccaatgaaaatattgatgtcaatgaagagcttccagccagaagaaaacgaaatcgtgaggatggggaaaagacatttgttgcacaaatgacagtatttgataaaaacaggcgcttacagcttttagatggggaatatgaagtagccatgcaggaaatggaagaatgtccaataagcaagaaaagagcaacatgggagactattcttgatgggaagaggctgcctccattcgaaacattttctcagggacctacgttgcagttcactcttcgttggacaggagagaccaatgataaatctacggctcctattgccaaacctcttgccactagaaattcagagagtctccatcaggaaaacaagcctggttcagttaaacctactcaaactattgctgttaaagaatcattgactacagatctacaaacaagaaaagaaaaggatactccaaatgaaaaccgacaaaaattaagaatattttatcagtttctctataacaacaatacaaggcaacaaactgaagcaagagatgacctgcattgcccttggtgtactctgaactgccgcaaactttatagtttactcaagcatcttaaactctgccatagcagatttatcttcaactatgtttatcatccaaaaggtgctaggatagatgtttctatcaatgagtgttatgatggctcctatgcaggaaatcctcaggatattcatcgccaacctggatttgcttttagtcgcaacggaccagttaagagaacacctatcacacatattcttgtgtgcaggccaaaacgaacaaaagcaagcatgtctgaatttcttgaatctgaagatggggaagtagaacagcaaagaacatatagtagtggccacaatcgtctgtatttccatagtgatacctgcttacctctccgtccacaagaaatggaagtagatagtgaagatgaaaaggatcctgaatggctaagagaaaaaaccattacacaaattgaagagttttctgatgttaatgaaggagagaaagaagtgatgaaactctggaatctccatgtcatgaagcatgggtttattgctgacaatcaaatgaatcatgcctgtatgctgtttgtagaaaattatggacagaaaataattaagaagaatttatgtcgaaacttcatgcttcatctagtcagcatgcatgactttaatcttattagcataatgtcaatagataaagctgttaccaagctccgtgaaatgcagcaaaaattagaaaagggggaatctgcttcccctgcaaacgaagaaataactgaagaacaaaatgggacagcaaatggatttagtgaaattaactcaaaagagaaagctttggaaacagatagtgtctcaggggtttcaaaacagagcaaaaaacaaaaactctgaaaagctctaaccccatgttatggacaaacactgaaattacattttagggaattcatcctctaagaattatgtttttgtttttaatcatatgttccaaacaggcactgttagatgaagtaaatgatttcaacaaggatatttgtatcagggttctacttcacttcattatgcagcattacatgtatatcacttttattgatgtcattaaaacattctgtactttaagcatgaaaagcaatatttcaaagtatttttaaactcaacaaatgtcatcaaatatgttgaattgatctagaaattatttcatatataaatcagaatttttttgcatttatgaacggctgtttttctactttgtaattgtgagacattttcttggggagggaaaattggaatggttcccttttttagaaattgaagtggtcttcatatgtcaactacagaaaaggaaaaaaatagaaattgaaggatttttatgaaattatattgcattactatttgcagtcaaactttgatccttgtttttgaaatcatttgtcaattcggaatgaaaaattataatgtaattttacattacataagttccttttacaattaaaaaatagcacttcttcatcttatgcctgtttgagaagatattaaattttcacattgttgacagtgaaatgctatgttggtttataagattacagaccatttgttttcatgtggataattttagtgcattgctcacccggtatgttttttttttttaacttgaacattttgcttgttttgtttttcttttttaattagataatcacacggaaaattaagctgttcatatctttaaattaggattgcaaaccaaggaaagaacgcatttgagattttaagatgtcacttataaggggagaagtgttcttaaaaagtcaaccagaaaactgttatgccttttatttgtttgcaaggatgtctttgtaatgtgtttcatgaatagaatatccaatagagataagctgacttgaatcattttgagcaattttgccctgtgttatatgtgtttcacgcacatatttgcagttggattttctccaacagaaagtggattcactactggcacattaacaagcaccaataggtttttattccaactccgagcactgtggttgagtaacatcacctcaattttttattatccttaaagatattgcattttcatattctttatttataaaggatcaatgctgctgtaaatacaggtatttttaattttaaaatttcattccaccaccatcagatgcagttccctattttgtttaatgaagggatatataagctttctaatggtgtcttcagaaatttataaaatgtaaatactgatttgactggtctttaagatgtgtttaactgtgaggctatttaacgaatagtgtggatgtgatttgtcatccagtattaagttcttagtcattgatttttgtgtttaaaaaaaaataggaaagagggaaactgcagctttcattacagattccttgattggtaagctctccaaatgatgagttctagtaaactctgatttttgcctctggatagtagatctcgagcgtttatctcgggctttaatttgctaaagctgtgcacatatgtaaaaaaaaaaaaaaaaagattattttaggggagatgtaggtgtagaattattgcttatgtcatttcttaagcagttatgctcttaatgcttaaaagaaggctagcattgtttgcacaaaaagttggtgattcccaccccaaatagtaataaaattacttctgttgagtaaactttttatgtcatcgtaaaagctggaaaaatccctttgtttctatttataaaaaaagtgcttttctatatgtacccttgataacagattttgaagaaatcctgtaagatgataaagcatttgaatggtacagtagatgtaaaaaaaattcagtttaaaagaacatttgtttttacattaaatgtttatttgaaatcaaatgattttgtacataaagttcaataatat

SEQ ID NO: 8299 - DNA, 5559 bp, Homo sapiens
ggctggcattgcagtgcgggccgtgcgggctgcgcgggcgcggggaggcgcgggcggcaaactgcgggcacccggcaccccgcagccagtaccgggcggaggcgtcagagccgcgcaccgcggacgagcaggcccaggcatccagtaccctgctgactctgacatgcccccagcctcccccagctctgcagggagccctggtgccagagaccttctcccatttctccctatgggtgcctgacctgagggcagagacatctgagtgtgtataagcacagcaggacaccaggacctggcctgaagacatttcctctcctcccctctggatttctcagagactgttctgcgatgaccacagcaaggtaccggcccacctgggacctggccctcgacccgctggtgtcttgcaagctctgtcttggggagtacccagtggagcagatgacaaccatagcccagtgccaatgcatcttctgtactctgtgcctgaaacagtatgttgagctcttgatcaaagaaggattagaaaccgcaattagctgcccagatgctgcctgccctaaacagggccacctacaggagaacgagattgagtgcatggttgcagctgaaattatgcaaagatataaaaagctacaatttgaaagagaggtgctgtttgatccctgtcggacttggtgcccggcgtccacctgccaagctgtgtgtcagctccaggacgtggggctgcagaccccccagccagtgcagtgcaaagcctgccgtatggaattctgctccacctgcaaagccagctggcaccctggccagggctgcccggagaccatgccgatcaccttcctccccggggagaccagtgctgctttcaaaatggaagaagatgacgcgcccatcaagcgctgccccaagtgcaaagtctacatcgagcgagacgaaggctgcgcgcagatgatgtgcaagaactgcaagcacgccttctgctggtactgcctggagtctctggacgatgatttccttctgatacactacgataagggaccctgccggaacaagctgggccactcccgggcatctgtgatctggcatcggacacaggttgtgggcatttttgcaggatttgggctgctgctcttggtggcctcacctttcctactcctggccactccctttgtactttgctgcaagtgcaagtgcagtaaaggtgacgacgacccgttacccacctagaggaagcgcgatgctggaacacatccctgcctccgggaagtgtggctctcccccaaccctccccaccgtccccccttcactaaacatctttcttgccttatgtgccccattgagcttcacagtgtcaggctggacgccgtgatttcagggacctatgtcacaatgttcgctgaggccccaggtgtggtggggaggggaggcaggtgtgggtagcgcacatccccacagatcaatctctgcagatgacagggaggtgctgtgagaagtgcaccaggcagctttctctctgtggtagactaggcatgtctggggatggcctaagagactttctgctccttggcttctagatggcaccatgttgtcagagaagtcttttaaggactgccactctcttcagacagaatctgattattccagcttgagagaagcactctgtttatgacaactgtttttattactaatggcatttagtaaaatcctttttagaaggtattttttttccaactgagtagtgaaaatcaacaaggtgcatataaaccatcctatgcctttcttgaaatgtgcattttaagaagttatagttaaacgacttttcaggagatttagaaagccttatgcactctttgtgtttttcttgaaacttgctgtagtaactttttgaacgctgtaagctgtgtactgttataagtgtgcttcctatattgttgcatttccttgataatattgacgtgtttaaaggaacatctcatctccattagatttgccttttgttgttttctctctttggtgattcagctcagctcatgggcctcatcccttctctcccaggtagcagaaaacgctttttattgcattcaatcccactgctttgctcggcaatggttctcctccgaattgctgccgtctggcctctggcctcagtcttcagatagacagtaagaagaaagcagcctcattgatccgcagatgtaggggcctcttggcagaggctggaggactctgggggctagggaagagcctgccagattttcacatttttaaaatgttctagtcattttgagaaatcatatatcttacacagttccaagtcctgttgctaaccgttttgctcttgttggggaaaagaacctcccatttcacttcgttttaacgtggggattttaccacttgatcttttacagggctgtctgtgaccatttccatggcagcaggatgcagggattaataaggacacatacacattattccaccaattgactttgaaaagtggagaaagtgtattctttaaagagaatttacttctaaaagccacaggtgcttttacaaagcaaactgcattgaatttaaaacttctaaaaataacaggcaaatattgtagctatattacagtgggattttaaaaatcttgttaaacattctataaagaagtaaaacaaaatccttttatctcagttatttgcccatcacaagcacatttttaaaatgttgctttgtgtgtgtttgacttctgcatttgagtatcagtctcaggtcctagtttactttccctggttggaaatttatttcttatttcctaacattgaattcgttagaaaaaacagcgtcacctcactcttcacctgtcatgttgattttccttatgaacccgaagccatttagaaaatccctgtgtgtcaaaattacattcaaaaagctctccttgtaattgcaagtttagtaactcagtaagaacatgcctgcgactccctttctggatggaacctgggctgtggctctctgtcgtttgtggtgctgtgatggtgtctactgttagaatagcttttctggaggtgggtggcaactccacgcgggagtcattggctgggcttgagccctcagcctgtgatatgtggatgcagctgtccagccactgccctttaacatgcccagcacacatgggaggcctgtggccctgtgcccagtggcccacaggacacgcctccaccatatgctcatccttcctgcctgaaattgctgctgcccatcgcatgagcccacacagtagcacccccgtccttaggatgagagtcagagcctttggaaaggctgcatccccagggctagagctcagatgaccttatttctagagggacaggctgttctgttggaagagtctctggcccagtcatgcacatctgtagccccagccatccttgtgccttcacctctgatgtgtttcacaagcacgtagttcaacccagatagggaccacagagattctggggccagccaggggcagtcaaattagcacctactggctctgactttttgtatgaagcatgcctcagtttcctcattttgatctagatataaaattaaaattgtccatttcctatataaataccagcaagatcactctgagatacataaactcgcatttccttctgttttagtaaggagtgccagacttatctttgatgggaatacagtatgaaccctgcttgatgtaaaatggaaatagcacacaggcagatggccctgggtttggactttgatcttgccatcattccccagtaaaacctggggagttctgcgttgagtggacggacttattcctgtgaagcggcataatttgtctccattgaaaaatggcattcactcttacagatggtgttcactgcaagccccagaagcatatggcatgtgttcactaagaggcctttaatcctggggagtaaggggcgaaggcccttagacaaccatggctgctgtaccgccgcccagggtgggtggccagtgaggactggccttagcccagtggacctgtggcttctctgaggcccttgagtaactgaccacatttggaggttttgctggaaatgcctgacctctcagtctggctctgctgtgtagtccatagcccagccagatgagcttgcagcctcataggaggtcagcaccttgcaaagatgcagtcaccatagatgtccacgtagcagagactgacttaggatctgagataaagcatcggattgcaggaataactgtccaaattagttcttcctcctcaactcataggagtagctgtggacagaggaaccaacatctgccacctctggcattttctttcttttttttctttttgagacggagtttcgcttttgtcccccaagctggagtacaatgacaggatctcggctcactgcaagctctgcctcccgggttcaagcgattctcctgcctcagcctcccaagtagctgggattacaggcacccaccacctcacccagctaatttttgtattttcagtagagacggggtttcaccatgttggccaggctactctcaaactcctgacctcaggtgatctgcccacctcggcttcccaaagtgctggaattacaggcctgagccaccccacccggcctattttcttaaaggggaacaaatgatcttgacaacatattattccataaaaccagtttagggcacaggccagttcctgattagaacacaggacctgtgggagggactatcagagatgcaaaaattacttcaagatgagtttattgttttcatttgtattgcaaaagttagaagtcattttacaaattaaaaaaacatttttttcttggtagtctttaaaaattaggggattgaaaggatccaggatgggctttgtgtgtgtgtctcagattctcatttattagtgagcacacctgtgtatatatataaatcacaaggagatcatcaagggaaaacattttgcatgtgtaaagcttcatgaagttctctttaaaaaataccaaagcttgtttatttctgataattaacctaagcccttatgaaaataaacaaaatgaagggattatgacaggtattaccaaaaacaccaaaaggaacaaaggggcctgcgttaaaacctaattgctaatgcttcacaactaggagagcatgccgtcttgatgtttaaaaaacccagggtctccacccttcctttgatttgtgcaattctgtcttccacagttccggagccttcagtgaggggtagctacatgccccatgcctgccctttctttccttctttgctcactttactatgggtgtattttaatcttgtataaaaatatgcatgaatgagtcatgcacatgtatacgttatgtatttgacaagtggtggtgaaacaaaatcaaaacagatttgatttgtgtttttgaaatgtcagtacattttgtgccactaacactgtgatgtataaaagagctgtttgaatgccttttaatgttgtgttttgtactctggaatcatatggaaaaagtttgatttgtaatttcaatacatattttaaatgt

SEQ ID NO: 8300 - DNA, 6504 bp, Homo sapiens
ataaagacttcaaatggaaattagatgcaatattgaaaaacgtgcccaatttgttacacatggagtccagcaagctaaaagtacagaaggtggagccctggaacagcgtgcgtgtgacattcaacatcccccgggaagcagcggagcggctacggatccttgctcagagcaacaaccagcagcttcgggatttagggattctctccgttcagattgaaggggaaggtgctattaacctggctttggctcagaaccgaagccaagatgtgagaatgaatggacccatgggagctggaaattcagttaggatggaggcgggatttcctatggcaagtggtccaggaataataaggatgaacaaccctgccactgttatgatacccccgggtggaaatgtgtcatcttccatgatggcaccaggccccaatccagagctgcagcccaggactcctcgccctgcttctcagtcagatgcaatggatccactcctctctgggctccatatacagcagcaaagtcatccctcaggatctttagctcccccacatcacccaatgcagcctgtctctgtgaacagacaaatgaacccagctaattttccccagctgcagcagcagcagcaacaacaacaacagcagcagcagcagcagcagcagcaacaacagcaacagcagcaacaacagttgcaggcaagacccccacagcaacatcagcagcaacagccacagggaattcgaccccagtttactgccccaactcaggtgcctgttcctccaggctggaaccagctgccttctggagcccttcaacctcctccagcccagggttctctgggcacaatgactgcaaaccaagggtggaagaaggctcccttgcccggcccaatgcaacagcaactccaggcaagaccatccttagccacggtacagacgccttcccaccctccccctccatatccctttggcagccagcaagcctcacaagcccacacaaactttcctcagatgagcaacccaggccagttcacagctcctcagatgaagagtttgcagggagggccctctagggtcccaactcccttgcagcagccccacctcaccaacaagtctcctgcctcctcaccctcctccttccagcagggatcccctgcatcctccccaacggttaaccaaactcagcagcagatgggaccaaggccacctcaaaataacccacttccccagggatttcagcagcctgtcagctctccgggtcggaatcctatggttcaacagggaaatgtgccacctaacttcatggtgatgcagcagcaaccaccaaaccaggggccacagagtttacatccaggcctaggaggaatgcctaaacgcctcccacctggcttctcagcaggacaggccaatccgaactttatgcaaggtcaggtgccttcgaccacagcaaccacccctgggaattcaggagcccctcagctgcaagcaaatcaaaatgtccagcatgcaggtggtcaaggagctggtcctcctcaaaaccagatgcaggtgtcccacgggccgccaaatatgatgcagcccagcctcatgggaattcatggcaacatgaacaatcagcaggctggtacttctggggttcctcaagtgaacctcagcaacatgcaaggccagccccagcagggcccaccatctcagctgatgggcatgcaccagcaaatcgtgccctcccagggccagatggtccagcaacaaggaaccttgaaccctcagaaccctatgatcctttcaagggcccagcttatgccacagggccagatgatggtgaaccccccgagccaaaatcttgggccctcgccccaaaggatgaccccacccaagcagatgctttcccagcagggcccacaaatgatggcgccacataaccagatgatggggcctcaggggcaggttttgctccaacagaacccaatgatagagcagattatgaccaatcaaatgcaggggaataagcagcagtttaacactcagaaccagtccaatgtcatgccgggaccagcccagataatgaggggaccaactccgaacatgcaaggaaatatggtgcagtttacgggacagatgtcaggacagatgctgccccagcaagggcctgtgaacaacagtccatctcaggttatgggcattcagggacaggtcctgcggccaccagggcccagcccacacatggcccagcagcatggtgatcctgctactacagcaaataacgatgtcagtttatctcagatgatgcctgatgttagcattcaacaaaccaacatggtcccccctcatgtgcaggccatgcagggaaacagtgcctcgggaaaccacttctcaggccatgggatgtctttcaatgcacctttcagtggagctcccaatggaaatcagatgtcctgtggtcaaaatccaggcttcccagtcaataaggatgtcacgctaacgagcccattgttggtcaacttattgcagagtgacatatctgcaggccattttggggtaaacaataagcaaaataataccaacgcaaataaaccgaagaagaagaaaccccctcggaagaagaaaaatagtcagcaagatctaaacaccccagatactcgcccagctggtctggaagaggctgatcagccaccgttgcctggagaacaaggaattagcttggataactcaggccctaaactgccagaattttcaaaccggccaccaggttatccttctcaaccagttgaacagaggccacttcagcagatgcctcctcaactcatgcagcatgtggcacccccaccacagccaccacagcagcagccacagccacaactgcctcagcagcagcagccaccacctcccagtcagccacagtctcagcagcagcagcagcagcagcaacaaatgatgatgatgctcatgatgcagcaggatcccaaatcagttaggcttccagtctctcaaaatgtccatcctccaaggggccccctgaaccccgactcccagagaatgcccatgcaacagagtggcagtgtgcctgtcatggtcagtctgcaaggacctgcctccgtgccaccatcacctgataaacaaagaatgccaatgcctgtgaatactcccttgggaagcaattcaaggaaaatggtctatcaggagagcccgcagaatccttccagctcgccactggcggagatggcctcactccctgaagcaagtggcagtgaagcaccatctgtcccaggaggcccaaacaacatgccttcacatgtagtacttccccagaatcagttaatgatgacagggccaaaacctggaccatcgcccctttcagcaactcaaggtgcaactccccagcaaccccctgtaaattccctgcccagctctcacggccaccacttcccaaatgtggctgcgccaacccagacatctaggcccaaaacaccaaacagagccagccccagaccctattatcctcagacacccaacaaccgccctcccagcacagaaccttcagaaatcagtctgtcaccagaaagactcaatgcctccatagcaggactcttccctccacagattaatattcctttacctcctaggccaaatttaaacaggggctttgatcaacaaggcctaaatccaacaactttgaaggccatcgggcaagcaccttcaaatcttaccatgaatccttccaattttgctaccccacaaactcacaaattagattctgtggtagtgaattctggaaagcagtctaattctggagcaacaaaacgggcaagtccaagcaacagtcgcaggtctagtcctgggtccagtaggaaaaccactccaagccctgggaggcaaaattcaaaagcccctaaacttactctggcctctcagacaaatgcagccctattgcagaatgtggagttgccgagaaatgtattggtcagtcccactcctctggccaatccccctgtacctgggagctttcctaacaacagtgggctgaatcctcagaattctactgtgtctgtggctgcagttgggggtgttgttgaggataacaaggagagcttgaatgtgcctcaggacagtgattgccagaattcccagagtaggaaggaacaggtaaacattgaactaaaagcagtccctgcccaagaagttaaaatggttgtccctgaagatcagtccaaaaaggatgggcagccttcggatcctaacaaacttcccagtgtcgaagagaacaaaaatttggtgtctcctgctatgagggaagcaccaacatcgttaagtcaacttcttgacaactctggagctcccaatgtgacaattaaaccccctgggcttacagatctggaagtaacacctccagtagtttctggggaggacctcaaaaaagcatctgtcattcccacactgcaggatctgtcttcttctaaagaaccttctaattccctaaacttacctcacagtaatgagctgtgttcatcccttgtgcatcccgaattgagtgaggtcagttctaacgttgcaccaagcatccctccagtaatgtcaagacctgttagctcttcctccatttccactcccttgcccccaaatcaaataactgtatttgtcacttccaatcccatcacaacttcagctaacacatcagcagctttgccaactcacttgcagtctgcattgatgtcaacagttgtcacaatgcccaatgcgggtagcaaggttatggtttctgagggacagtcagctgctcagtctaatgcccggcctcagttcattacacctgtctttatcaattcatcctcaataattcaggttatgaaaggatcacagccaagcacaattcctgcagccccactgacaaccaactctggcctgatgcctccctctgttgcagttgttggccctttacacatacctcagaacataaaattttcttctgctcctgtaccgcctaatgccctctccagtagtcctgctccaaacatccagacaggtcgacctttggtccttagctcacgagccacccctgttcagcttccttcccctccttgtacgtcttctccagttgtcccttctcatccccctgtgcagcaagtgaaagaattgaatccagatgaggctagccctcaggtgaacacctcagcagatcagaacactcttccctcttcacagtcaaccacaatggtttctccccttttgaccaatagtccagggtcctctggcaaccggcgaagcccagtctcgtctagtaagggcaaaggaaaagtggacaaaattggccaaattttgttgaccaaggcatgtaagaaagttacaggctctcttgagaaaggggaagaacaatatggtgcagatggagagactgaaggccaagggctagacaccacagctccggggctcatgggaacagagcagttatccacagagctggacagtaaaaccccaacgcccccagcacccactctgctaaaaatgacctctagccctgtgggcccgggcactgcctcagcaggacccagcttacctggcggtgctctccccaccagtgtacgctcgatagtaaccactctggtaccctccgagctcatctccgccgtaccgaccacaaaaagcaatcatggtggcatagcatctgagtcacttgcgggtggcctagtggaggagaaggtgggatcccatccagaacttctacccagcatagccccgtcgcagaatttagtctcaaaggaaacttcaaccacagcactgcaggcctctgttgccagaccagagctggaggtaaatgctgccatagtctctggacaaagcagtgagcccaaagagatagttgaaaagtccaaaatcccaggccgaagaaactcccgaactgaagagccaactgtggcctctgaaagtgtggaaaatggacatcgtaaacgatcttctcgacctgcttcagcctccagctctactaaagacataaccagtgcggtgcaatccaagcgaagaaaatccaagtaaacaagcaggactgcgacttgatacttggaaatgtgtgtgacttttacaaagagcaattttgagctgtgacttttttaaatcaatttctgtacagttagtaattttaataatgtggcccttttcctagtccctgcaacctgtttcataaagtgcaatggggaaagcaggactgttgagcccttttggtgttgcgagttgaagttcaaggtttctaaaatgttgtcttgtattgaaaggagctaatgccattataaatgttactagttttcacatttcctaagcagcctagagtacagggtgagcatttttagatctcctaatgtattgtgccgtggaagtactgtgtgtgaatagcagtagtgggggcaaaagcaatcttctcatttggaaatgttgtaaataattttattatatagtgttttggatgtatttgttgtagaaatggaccagtgaataaagagaatctaaggatttgtacaatgtg

SEQ ID NO: 8301 - DNA, 6571 bp, Homo sapiens
ggcatgcgtgcagctctttggaggcggtagctttttcggcgtcgagactggaggctgagtgctaaactgtgtggggcgcggatgggatccagctgttagtcgggtaggcatagctttgtgttattcttggaaaatttcgcaccacttgtgaattccttgaacctgggcattgcaaacccacttctgttgggcccatctcctttgcactttgctcagattaagactcagttggcgcttcagcagctgaatgccgttgcctcacatggttcaacaccaccttatactttattaaatcaggctttcttgaaaatagccatgtcgagacccaggtttaatcctcgaggagactttccacttcaaaggccacgagcacctaacccttctgggatgaggcctccaggaccatttatgaggcctggatctatgggtctcccaagattttacccagcagggagagcacgtggaattccacacagatttgctggcctggaatcttatcagaacatggggccacagagaatgaatgttcaggtaactcaacacagaactgatccaagattgaccaaagaaaaactggattttcatgaagcacaacagaagaaggggaagcctcatggtagccggtgggatgatgagcctcatatatctgcatcagtggcagtgaaacagagttctgtaacacaggttacagagcagagtcccaaagtacagagccgctatacaaaagagagtgcctcaagtatcttagcaagttttggattatctaatgaagacctagaagaacttagtcgctatcctgatgaacaactaactcctgaaaatatgccattaattttgagggatataagaatgcgaaaaatggggcgccgattacctaatttaccttctcagagcagaaataaagaaacacttggtagtgaagcagtttcaagtaatgtgatcgattatgggcatgcaagcaaatatggctacacagaagatccacttgaagtacgtatttatgatcctgaaattccaactgatgaggtcgagaatgaatttcagtcacagcagaacatttctgcatctgttcccaatccaaatgtgatatgtaattctatgtttcctgttgaagacgtatttcgccaaatggacttccccggtgagtcctccaataatcggtcctttttctcagttgagagtggaaccaagatgtcaggcttacacatttcaggaggacagtcagtccttgaacccataaaatccgtcaaccaatccattaaccaaacagttagccagacaatgagtcaatctctgattcctccatctatgaaccagcaacctttttcgtcggaattaatttcatctgtaagccagcaagagcggatcccacatgaacctgtgattaattcatctaacgtacatgttggatcaagaggaagtaaaaagaattaccagtcacaggctgacattcccattcggtctccctttggtattgtgaaagcatcctggctaccaaagttttcacatgctgatgcccagaagatgaagagacttccaactccttctatgatgaatgattattatgcagcatctccaagaatatttccacatttgtgttctctgtgtaacgtagaatgtagtcatttgaaggattggattcagcatcaaaatacatctactcatattgagagctgtcgacagttacgtcaacagtatcctgattggaatcctgagatcctcccatcgagaagaaatgagggcaatagaaaagaaaatgaaactccacgaagacgttctcattcccccagtcctaggcgttctagaagatcaagctcaagtcacagattccgtcggtctcgaagcccaatgcattacatgtataggccgagaagtcgaagtccaagaatttgccatcgtttcatttctagatacagatccagatccagatcccgttcaccatatcgaattagaaatccatttagaggtagtccaaaatgctttcgatcagttagccctgagaggatgtcaaggagatcagtgagatcatcagatagaaaaaaagcattagaagatgtagtacaacgatctgggcatgggacagaatttaataaacagaagcatcttgaagctgctgataagggacattcaccagcacaaaagcctaaaactagcagtggaacaaaaccatcagttaaacctacaagcgctacaaagagtgattcaaatctaggaggacattctattcgttgtaaatcaaagaatcttgaagatgacactttgtcagaatgtaaacaggtgtctgataaagctgtttctctccagcgaaagcttcggaaagaacagtcattgcattatggttcggttcttcttataactgaattaccagaggatggttgtactgaagaagatgtgagaaaattatttcaaccatttgggaaagtgaatgatgtcctaattgttccatatagaaaagaggcttacctagaaatggaatttaaagaggcaattactgcaattatgaagtacattgaaacaacacctcttacgataaaaggaaaaagtgtgaaaatatgtgttccaggaaagaaaaaagcacagaacaaagaggtgaagaaaaagactttagagtcaaagaaagtatctgcatctaccttaaaaagagatgcagatgcttcaaaagctgttgaaattgttacttcaacttctgctgccaaaactggacaagccaaggcatgtgtagccaaagtaaacaaatctacagggaaatcagcaagttctgtaaaatctgtggtaacggtagctgttaaaggtaataaagcttcaatcaaaacagcaaaatctggtggaaagaagtctctagaagccaaaaagactgggaatgtcaaaaacaaagactctaacaaacctgtgactataccagaaaactctgaaataaagaccagtattgaagtcaaagccactgaaaactgtgctaaagaagctatttctgatgctgctttggaggccacagagaatgaaccacttaacaaggaaacagaagaaatgtgtgtgatgcttgtctctaatttgcctaataaaggatattctgtagaagaagtttatgacttagcaaaaccatttggtggtttaaaggatatcttgattttatcatctcataaaaaggcatatatagaaataaatagaaaagctgctgagtctatggtaaaattttatacctgcttcccagtattgatggatggaaatcaactctcaataagtatggctcctgaaaacatgaatataaaagatgaggaagctatatttataaccttggtaaaagaaaatgacccagaggcaaacatagatacaatttatgatcgatttgtacatcttgataatttaccggaagatggacttcagtgtgtactttgtgttggacttcagtttggaaaagtggatcaccatgtattcataagtaatagaaacaaggcaattcttcagttagatagtcctgaatctgctcagtcaatgtatagctttctgaaacaaaatccacaaaatattggtgaccatatgttgacctgctcattatctccaaagatagacttaccagaggtgcaaattgagcatgacccagaattagaaaaagaaagccctggcttgaaaaacagtccaattgatgaaagtgaggtgcaaacagcaactgatagtccctctgttaaacctaatgagcttgaagaagaaagtactcccagcattcaaacagaaactttggtacagcaggaagagccttgtgaggaagaagctgaaaaagcaacatgtgattctgactttgctgttgaaactttggagcttgaaactcaaggagaggaggtcaaagaagaaattcctcttgtagcatccgcttcagtcagtattgaacaattcactgaaaatgccgaggagtgtgctttaaatcagcagatgtttaacagtgacttggagaagaaaggggcagaaattattaaccctaaaacagcattgttaccatctgacagtgtgtttgcagaagaaaggaacctcaaaggaattctagaagaatctccatctgaagcagaagatttcatttctggaattacacagactatggtagaagctgtagctgaagtagaaaaaaatgaaactgtttcggaaatattgccatcaacttgtattgtgacgttagtaccaggaattcccactggggatgagaagacagtggacaaaaagaatatttctgaaaaaaaaggtaacatggatgaaaaggaggagaaggaatttaatactaaggaaaccagaatggatcttcaaataggaacagagaaggctgaaaagaatgaaggtaggatggatgcagaaaaggtggaaaagatggcagcaatgaaagaaaagcctgcagaaaacactttattcaaggcatacccaaataaaggagtgggtcaggctaataagcctgatgaaactagtaaaactagtattctggctgtatcagatgtatctagcagtaaaccaagcatcaaggctgttatagtctcttctcctaaggcaaaagctacagtttcaaaaactgaaaatcagaaaagttttccaaaatctgtgcccagagatcaaataaatgctgaaaagaaactttcagccaaggaatttggtctgcttaaacccacaagtgccaggtcaggcttggcagaaagcagcagtaaattcaaacctactcagagcagtcttaccagaggaggcagtggaaggatctcagccctgcaaggcaagctttctaaactggattacagagatataacaaaacaatctcaggaaacagaggctagaccttccatcatgaaacgggatgacagcaacaataagactttggctgagcaaaacactaagaatcctaaaagcactactggtagaagttccaaatctaaagaggagccattatttccatttaatttggatgaatttgttactgtggatgaggttatagaagaagtgaatccttctcaggccaagcagaatccactaaagggaaaaaggaaagaaactctcaaaaatgttcctttctctgaacttaacttaaagaagaaaaaggggaaaacttccactcctcgtggtgttgagggagaactatcttttgtgacattggatgagattggggaagaggaagatgcagctgcacatctagcacaagctctagtcactgtggatgaagtaattgatgaagaagaactaaatatggaagaaatggtaaaaaattcaaattcactttttacattagatgaattaattgaccaagatgattgcatttcccacagtgaacctaaagatgttactgttctgtcagtggctgaagaacaagatctcctcaaacaggaacgcttggtaactgtggatgaaattggagaagtggaagagctacctttgaatgagtcagcagacataacttttgccactttaaatactaaaggaaatgaaggagatatcgtaagggattccattggcttcatttcttctcaggtgcccgaagacccttctactttagttactgtagatgaaatacaagatgacagcagtgatttgcatttagtgactttggatgaagtaactgaagaggatgaagactctctggcggattttaacaaccttaaagaagagcttaattttgttactgttgatgaagttggagaggaggaagatggagataatgatttaaaagttgagttagcacaaagcaaaaatgaccatcccacagataaaaaagggaatagaaagaagagagctgtggacacaaaaaagacaaaacttgaatccttgtcccaagtgggtccagtaaatgagaatgttatggaagaagatctaaaaaccatgattgaaagacacttaacagctaaaactccaaccaagagagttagaattgggaaaactctgccatcagaaaaagctgttgtgacagaaccagcaaaaggtgaagaggccttccagatgagtgaagttgatgaggaatctggattaaaggattcagaaccagagcgaaaacgcaagaagactgaagactcttcttcaggcaaatcagtggcgtctgatgtccctgaggaattagactttcttgtacctaaggctggattcttctgtccaatttgttccctcttctactcaggtgaaaaagcaatgacaaatcactgcaagagtacacgtcataagcaaaatactgagaaatttatggccaagcaaagaaaggaaaaggagcagaatgaggctgaagaaagaagctctaggtgattgggggaaaggaaagaattcactagaaatttgtttagggtccagttgatttgtgtatttttgttatcatttaatttgtaattttcgtttcagaagcaaatattcgtgttgtacaaatttctgattgccctaaatgtagagagactgatggggaaagtatgatgggtttgatttttatatcaaatcatcaggcatggagaaatatcttttagaagtgttaaaataaatgttcctactgtatatttaaaaaaaaaaaaaaaaaaaaaaaaaaaaaaaaaaaaaaaaaaaaaaaaaaaaaaaaaaaaaaaaaaaaaacaaa

SEQ ID NO: 8302 - DNA, 3205 bp, Homo sapiens
cgactcgtcgccattcccggagcaggtcggcctcggcccaggggcgagtatccgttgctgtgtcggagacactagtccccgacaccgagacagccagccctctcccctgcctcgcggcgggagagcgtgtccggccggccggccggcggggctcgcgcaacctccctcgcctccccttcccccgcagcctccgccccgccaggcccggcccggactcccgagccccggcctcctcgtcctcggtcgccgctgccgccgggcttaacagccccgtccgccgcttctcttcctagtttgagaagccaaggaaggaaacagggaaaaatgtcgccatgaaggccgagaaccgctgccgccgccgacccccgccggccctgaacgccatgagcctgggtccccgccgcgcccgctccgctccgactgccgtcgccgccgaggcccccgttgatgccgctgagctcccccaacgccgccgccaccgcctccgacatggacaagaacagcggctccaacagctcctccgcctcttcgggcagcagcaaagggcaacagccgccccgctccgcctcggcggggccagccggcgagtctaaacccaagagcgaattactaatttcagctggattcaatttgttgtcagttgattctgtagtaaggccatatgttgcccctctggaggtgcttgtcaactactctggatgatggatggaaagaactccagtggatccaagcgttataatcgcaaacgtgaactttcctaccccaaaaatgaaagttttaacaaccagtcccgtcgctccagttcacagaaaagcaagacttttaacaagatgcctcctcaaaggggcggcggcagcagcaaactctttagctcttcttttaatggtggaagacgagatgaggtagcagaggctcaacgggcagagtttagccctgcccagttctctggtcctaagaagatcaacctgaaccacttgttgaatttcacttttgaaccccgtggccagacgggtcactttgaaggcagtggacatggtagctggggaaagaggaacaagtggggacataagccttttaacaaggaactctttttacaggccaactgccaatttgtggtgtctgaagaccaagactacacagctcattttgctgatcctgatacattagttaactgggactttgtggaacaagtgcgcatttgtagccatgaagtgccatcttgcccaatatgcctctatccacctactgcagccaagataacccgttgtggacacatcttctgctgggcatgcatcctgcactatctttcactgagtgagaagacgtggagtaaatgtcccatctgttacagttctgtgcataagaaggatctcaagagtgttgttgccacagagtcacatcagtatgttgttggtgataccattacgatgcagctgatgaagagggagaaaggggtgttggtggctttgcccaaatccaaatggatgaatgtagaccatcccattcatctaggagatgaacagcacagccagtactccaagttgctgctggcctctaaggagcaggtgctgcaccgggtagttctggaggagaaagtagcactagagcagcagctggcagaggagaagcacactcccgagtcctgctttattgaggcagctatccaggagctcaagactcgggaagaggctctgtcgggattggccggaagcagaagggaggtcactggtgttgtggctgctctggaacaactggtgctgatggctcccttggcgaaggagtctgtttttcaacccaggaagggtgtgctggagtatctgtctgccttcgatgaagaaaccacggaagtttgttctctggacactccttctagacctcttgctctccctctggtagaagaggaggaagcagtgtctgaaccagagcctgaggggttgccagaggcctgtgatgacttggagttagcagatgacaatcttaaagaggggaccatttgcactgagtccagccagcaggaacccatcaccaagtcaggcttcacacgcctcagcagctctccttgttactacttttaccaagcggaagatggacagcatatgttcctgcaccctgtgaatgtgcgctgcctcgtgcgggagtacggcagcctggagaggagccccgagaagatctcagcaactgtggtggagattgctggctactccatgtctgaggatgttcgacagcgtcacagatatctctctcacttgccactcacctgtgagttcagcatctgtgaactggctttgcaacctcctgtggtctctaaggaaaccctagagatgttctcagatgacattgagaagaggaaacgtcagcgccaaaagaaggctcgggaggaacgccgccgagagcgcaggattgagatagaggagaacaagaaacagggcaagtacccagaagtccacattcccctcgagaatctacagcagtttcctgccttcaattcttatacctgctcctctgattctgctttgggtcccaccagcaccgagggccatggggccctctccatttctcctctcagcagaagtccaggttcccatgcagactttctgctgacccctctgtcacccactgccagtcagggcagtccctcattctgcgttgggagtctggaagaagactctcccttcccttcctttgcccagatgctgagggttggaaaagcaaaagcagatgtgtggcccaaaactgctccaaagaaagatgagaacagcttagttcctcctgcccctgtggacagcgacggggagagtgataattcagaccgtgttcctgtgcccagttttcaaaattccttcagccaagctattgaagcagccttcatgaaactggacacaccagctacttcagatcccctctctgaagagaaaggaggaaagaaaagaaaaaaacagaaacagaagctcctgttcagcacctcagtcgtccacaccaagtgacactactggcccaggctaccttctccatctggtttttgtttttgtttttttttcccccatgcttttgtttggctgctgtaatttttaagtatttgagtttgaacagattagctctggggggagggggtttccacaatgtgagggggaaccaagaaaattttaaatacagtgtattttccagcttcctgtctttacaccaaaataaagtattgacacaagag

SEQ ID NO: 8303 - DNA, 250 bp, Homo sapiens
tattttacaggacattttctttaactttgcaaactggtcttcctgctggcacatactgtgatgtcatttctggagataaaattaatggcaattgcacaggcattaaaatctacgtttctgacgatggcaaagctcatttttctattagtaactctgctgaggatccatttattgcaattcatgctgaatctaaattataaaatttaaaattaaatgcatatcctcaaaacaatagccaagtgtgtttctt

SEQ ID NO: 8304 - DNA, 1266 bp, Homo sapiens
atgttccgagcggcggctccggggcagctccggcgggcggcctcattgctacgatttcagagtaccctggtaatagctgagcatgcaaatgattccctagcacccattactttaaataccattactgcagccacacgccttggaggtgaagtgtcctgcttagtagctggaaccaaatgtgacaaggtggcacaagatctctgtaaagtagcaggcatagcaaaagttctggtggctcagcatgatgtgtacaaaggcctacttccagaggaactgacaccattgattttggcaactcagaagcagttcaattacacacacatctgtgctggagcatctgccttcggaaagaaccttttgcccagagtagcagccaaacttgaggttgccccgatttctgacatcattgcaatcaagtcacctgacacatttgtgagaactatttatgcaggaaatgctctatgtacagtgaagtgtgatgagaaagtgaaagtgttttctgtccgtggaacatcctttgatgctgcagcaacaagtggcggtagtgccagttcagaaaaggcatcaagtacttcaccagtggaaatatcagagtggcttgaccagaaattaacaaaaagtgatcgaccagagctaacaggtgccaaagtggtggtatctggtggtcgaggcttgaagagtggagagaactttaagttgttatatgacttggcagatcaactacatgctgcagttggtgcttcccgtgctgctgttgatgctggctttgttcccaatgacatgcaagttggacagacgggaaaaatagtagcaccagaactttatattgctgttggaatatctggagccatccaacatttagctgggatgaaagacagcaagacaattgtggcaattaataaagacccagaagctccaattttccaagtggcagattatggaatagttgcagatttatttaaggtagttcctgaaatgactgagatattgaagaaaaaatgaatcaggatcatgccttaaaaagaaaacttttgttaaagtattccactgaaatcacagatatttgtgggtattataacaatcattggaaagcatggagagctacatttcataatttgagggaaaatttctaacagatgccagaatgcttgtttatgggattgctgtgtttccttttaattatttgtggttccaaacaattattgtttgaacttttttaattctgtactaaaatctataataaagcttttccacagctttaaaact

SEQ ID NO: 8305 - DNA, 1471 bp, Homo sapiens
ggaactgccacgatgctgccactttggactctttcactgctgctgggagcagtagcaggaaaagaagtttgctacgaaagactcggctgcttcagtgatgactccccatggtcaggaattacggaaagacccctccatatattgccttggtctccaaaagatgtcaacacccgcttcctcctatatactaatgagaacccaaacaactttcaagaagttgccgcagattcatcaagcatcagtggctccaatttcaaaacaaatagaaaaactcgctttattattcatggattcatagacaagggagaagaaaactggctggccaatgtgtgcaagaatctgttcaaggtggaaagtgtgaactgtatctgtgtggactggaaaggtggctcccgaactggatacacacaagcctcgcagaacatcaggatcgtgggagcagaagtggcatattttgttgaatttcttcagtcggcgttcggttactcaccttccaacgtgcatgtcattggccacagcctgggtgcccacgctgctggggaggctggaaggagaaccaatgggaccattggacgcatcacagggttggacccagcagaaccttgctttcagggcacacctgaattagtccgattggaccccagcgatgccaaatttgtggatgtaattcacacggatggtgcccccatagtccccaatttggggtttggaatgagccaagtcgtgggccacctagatttctttccaaatggaggagtggaaatgcctggatgtaaaaagaacattctctctcagattgtggacatagacggaatctgggaagggactcgagactttgcggcctgtaatcacttaagaagctacaaatattacactgatagcatcgtcaaccctgatggctttgctggattcccctgtgcctcttacaacgtcttcactgcaaacaagtgtttcccttgtccaagtggaggctgcccacagatgggtcactatgctgatagatatcctgggaaaacaaatgatgtgggccagaaattttatctagacactggtgatgccagtaattttgcacgttggaggtataaggtatctgtcacactgtctggaaaaaaggttacaggacacatactagtttctttgttcggaaataaaggaaactctaagcagtatgaaattttcaagggcactctcaaaccagatagtactcattccaatgaatttgactcagatgtggatgttggggacttgcagatggttaaatttatttggtataacaatgtgatcaacccaactttacctagagtgggagcatccaagattatagtggagacaaatgttggaaaacagttcaacttctgtagtccagaaaccgtcagggaggaagttctgctcaccctcacaccgtgttaggagactactgttatttgaccaatgaattgacttctaataaaatctagtggtgatgcaaaaa

SEQ ID NO: 8306 - DNA, 985 bp, Homo sapiens
gcggagctgggtgcgagcgccctaccgctttcgctttcccttcgcggtgcccactccactccttgtgcggcgctaggccccccgtcccggtcatggccatgctcagggtccagcccgaggcccaagccaaggtggatgtgtttcgtgaagacctctgtaccaagacagagaacctgctcgggagctatttccccaagaagatttctgagctggatgcatttttaaaggagccagctctcaatgaagccaacttgagcaatctgaaggccccattggacatcccagtgcctgatccagtcaaggagaaagagaaagaggagcggaagaaacagcaggagaaggaagacaaggatgaaaagaagaagggggaggatgaagacaaaggtcctccctgtggcccagtgaactgcaatgaaaagatcgtggtccttctgcagcgcttgaagcctgagatcaaggatgtcattgagcagctcaacctggtcaccacctggttgcagctgcagatacctcggattgaggatggtaacaattttggagtggctgtccaggagaaggtgtttgagctgatgaccagcctccacaccaagctagaaggcttccacactcaaatctctaagtatttctctgagcgtggtgatgcagtgactaaagcagccaagcagccccatgtgggtgattatcggcagctggtgcacgagctggatgaggcagagtaccgggacatccggctgatggtcatggagatccgcaatgcttatgctgtgttatatgacatcatcctgaagaacttcgagaagctcaagaagcccaggggagaaacaaagggaatgatctattgagagccctctctcccattctgtgatgagtacagcagagaccttcctgctttttactggggactccagattttccccaaacttgcttctgttgagatttttccctcaccttgcctctcaggcacaataaatatagttataccact

SEQ ID NO: 8307 - DNA, 2002 bp, Homo sapiens; identical to SEQ ID NO: 1203

SEQ ID NO: 8308 - DNA, 1319 bp, Homo sapiens
  misc_feature (1)..(1319): n=a,t,g or c
cgcgcccgtcccgtcgccgccgccgccgccgcagacccctcggtcttgctatgtcgagctcacccgtgaagcgtcagaggatggagtccgcgctggaccagctcaagcagttcaccaccgtggtggccgacacgggcgacttccacgccatcgacgagtacaagccccaggatgctaccaccaacccgtccctgatcctggccgcagcacagatgcccgcttaccaggagctggtggaggaggcgattgcctatggccggaagctgggcgggtcacaagaggaccagattaaaaatgctattgataaactttttgtgttgtttggagcagaaatactaaagaagattccgggccgagtatccacagaagtagacgcaaggctctcctttgataaagatgcgatggtggccagagccaggcggctcatcgagctctacaaggaagctgggatcagcaaggaccgaattcttataaagctgtcatcaacctgggaaggaattcaggctggaaaggagctcgaggagcagcacggcatccactgcaacatgacgttactcttctccttcgcccaggctgtggcctgtgccgaggcgggtgtgaccctcatctccccatttgttgggcgcatccttgattggcatgtggcaaacaccgacaagaaatcctatgagcccctggaagaccctggggtaaagagtgtcactaaaatctacaactactacaagaagtttagctacaaaaccattgtcatgggcgcctccttccgcaacacgggcgagatcaaagcactggccggctgtgacttcctcaccatctcacccaagctcctgggagagctgctgcaggacaacgccaagctggtgcctgtgctctcagccaaggcggcccaagccagtgacctggaaaaaatccacctggatgagaagtctttccgttggttgcacaacgaggaccagatggctgtggagaagctctctgacgggatccgcaagtttgccgctgatgcagtgaagctggagcggatgctgacagaacgaatgttcaatgcagagaatggaaagtagcgcatccctgaggctggactccagatctgcaccgccggccagctgggatctgactgcacgtggcttctgatgaatcttgcgttttttacaaattggagcagggacagatcatagatttctgattttatgtaaaattttgcctaatacattaaagcagtcacttttcctgtgctgtttcaaaaaaaaaaaaaaaaaaaaaaaaaaaaaaaaaaaaaaaaaaaaaaaaaaaaaaaaaaaaaaaaaaaaaaaaaaaaa

SEQ ID NO: 8309 - DNA, 1394 bp, Homo sapiens
gaccagggcgggcgagcgcagtgcagcgccgcgcggtgcgggcggccgagtgggggcgtcatggaggatgagcggagcttttcggatatctgcggcggccgcctggcgctgcagcgccgctactactccccgtcctgccgggaattctgcctcagctgccctcggctctcgctgcgttcgctcaccgctgtcacctgcacggtgtggctggcggcctacggactcttcaccctctgcgagaacagcatgatcctctctgctgccatcttcatcaccctcttaggtctgcttggttatctccattttgtgaagattgatcaggagactctgttaatcattgattcccttggcattcagatgacttcatcttatgcttcaggcaaagaaagcactaccttcatagaaatgggcaaggtcaaggatattgtcatcaatgaggccatttacatgcagaaggtgatttactacctctgcatcttattgaaagatccagtggaaccacatgggatatcccaagtagtacccgtcttccagagtgccaagccccggctggactgcttgattgaagtatacaggagctgccaggagatcctggcacaccagaaagccacatcaacaagcccatgagccccagcgttcagaaggccagcattgtcttccatgggagatgactcttaagccataggggctggttttccgtactccaaaccatcaggtggacacagtcctaggaaccattatggatgtagtgcatcttagagccatagagcaggtgactggaaatctaactcagtatatttccgtgtattatagtgttttccttgtaaggttttgcctactttaccaaaggaggggagaccttaagaattttgacacagtatgtcaaaagtaatgtcagcaaagaacactttcggaaattgctaagcatgttcaggtttactttgttgatgtttgtgaagcaaaacaatgggaaactgacatcagatgtcttgagaaagctatattttccaatagtaccccttgtgtaaagttacgaaaaaaaacaagcccttcagtactggttagcaggaagaaatgtcctacaaaagacgagtctgtcaacctagtgcctgtgttctgtacagggcttatttatttactgttaataaacagatcttccaaaacacacagttacctggttcacagatagctgctttttattgacaaacaagatcatagtatttcagtcatggtgtcaagcacattaatacttttctgttactcagcatttttttttatatcagttcaaaagctacttttgccaagaaggatgagacaaaaggccagacagaaattggactttggttttcagacatgggactctcatgttaacaaagaataaataagcaaatatt

SEQ ID NO: 8310 - DNA, 444 bp, Homo sapiens
agatttggcacgagtcggcacgaggcgggactgacgagaaactactaaagttcctggggaagcaaagtagaatttcataagaacaaaatggatggagaggagaaaacctatggtggctgtgaaggacctgatgccatgtatgtcaaattgatatcatctgatggccatgaatttattgtaaaaagagaacatgcattaacatcaggcacgataaaagccatgttgagtggcccaggtcagtttgctgagaacgaaaccaatgaggtcaattttagagagataccttcacatgtgctatcgaaagtatgcatgtattttacgtacaaggttcgctacactaacagctccaccgagattcctgaattcccaattgcacctgaaattgcactggaactgctgatggctgcgaacttcttagattgttaaataaaataaattataata

SEQ ID NO: 8311 - DNA, 8213 bp, Homo sapiens
cccccagcagaagggcgcgacggctgcaacatcagcggttaaattgtacagcctttcataggccggttcaatgcatccgtactaagattgttaaggctgagggtccctagcctggggaaaaacgaaaggaggcagagggtagggagacgggaaggaagacaaggagggtgtagaaaacggggagaggagggggcgggacagcatggggaaggcctcaggtttactggagagatcgtggcgttcccatagaaacgtatccctccgcccatgacccgcgtgttagtctcttcagttccttccgcgtcgtttcttggctgtttccgcccagctcctttgtgccgcgcagaacaacgagatgacgcatgcgcaaagcgcagcggccgcatatataaacgcgaacccgggctcttcctcgtagtgccgccgggactcttggcgggtgaaggtgtgtgtcagcttttgcgtcactcgagccctgggcgctgcttgctaaagagccgagcacgcgggtctgtcatcatgtcgcgttacgggcggtacggaggaggtaagaagctggagtccggtgagggacgttggtgtgggtgtagtgagcactgcgaggccgtagggttgtcgcggaggttgggagacggttattccgcgtgcgtaatggcggcttaggagcacgccagacgaagccggaggcagcggaggcggggtgctgaagggagacgggatggcgggtgtacatctctgccgagttccgtactcttgggcatttttgtggcccaatccagcctaaagcagggttgagatgacggttttcgcgttgcctttctcggagctgcccgccggcccccctccccccccgccctcggccggcggctgccattttgcgcacattgaggaccgtggtggcgcatttcctcagcgctttcccgccacttcagcggacagatctggccgcagctgtaagatcgtggttgtgtttgagatagaacgaaattggcagctgtgagctgcatgttctcgtcaaacaatcggttaaattgcggaatgggaatggggacgtaatctgcgactggcggctgggtttttttttagttatttccagcgcggtttatggctctggggcggggagctggagtcttgggcgagcctgtgcctgggacgtttgccgcggaggacgagagccggcgcagccctgctctcctggcccggcccctaccgaggccctcccgccgccgacgcgctgccgctgcgggcccgcgcgctcccggtgcgcccggggctgccgggactcatgggtggggccgggccaggtcccgccccacgcctcggtgtatcctaccacgcgtttctgcttgtgttcgggagggtcaccccgcattatttagaacgttaagaattttgtcaaaagtctagtttctcggggatttgcggacttcaccagttttacgactaagttttgtcttggatagagggcattaaatgtgctttacccaatcttgaggatggcccgttttaaggcaagtaagtaattgaaacttgggccagattttgcataacgtgcattcttctatttgcgtttttaaacagaaaccaaggtgtatgttggtaacctgggaactggcgctggcaaaggagagttagaaagggctttcagttattatggtcctttaagaactgtatggattgcgagaaatcctccaggatttgcctttgtggaattcgaagatcctagagatgcagaagatgcagtacgaggactggatggaaagtaagtaagatgttatgaatcttctgttcattaaaatatactgtggctagataatgaacttagtgctaaatttggattctgaagtctggaagagaccttaaatagctggtcatagtgttaaatgctaaaggcacacgaaggttaaagaagatagcggagatggagttagggcttggtaaagaccgccaaagtttgttgggggggaaggagtggttggaaagagtgagtggttggaaagagttctttttaaatctataagtcctgaatatatttttaactttagaattttgttaatttgcttttattagggtgatttgtggctcccgagtgagggttgaactatcgacaggcatgcctcggagatcacgttttgatagaccacctgcccgacgtccctttgatccaaatgatagatgctatgagtgtggcgaaaagggacattatgcttatgattgtcatcgttacagccggcgaagaagaagcaggtatttattttaataaaggaatggttggtattctagttaatcaagtaattcttttattagcaaggcagaaactagtgtttttctataaacttgaatgttaattgtacaggtgtattttacaatttgtgtttaattaaaaaaatgttactatattaataatcaacctggtcaaaacctttcaggtttcttcgtttgagtcagtcgccttgattcagaatgtcacgagccttatgatatcatgctgaggcgccttgcaaatccgacaattaagatcctcctagaccttgaggtgatcagcataagaggccagatcccctcgagtcatctacacctagcttcaccttattctttaaagggcagaaaatttgagacggtgatcgccgtaacagtaaatttggcttacaattggggcccccctccggtttagaaagaggaacaccagattgaccacattcccaactagaaaaatcttcttgcgtcaatcaagcctcacctggctcatttggctgtcagtttgatcgtcgttagattgaagaaaacatctagatgcagcgatcggctatagatacttctagatcgtctagatctactagaccatgggccaaagagggtcgacctgcaaacttgcaaggtttatgttaaatacacattacagtgttttatattatgtaatgctaagttgtaattcagcttttaacaaatctttttttaggtagtaaaaaaaaaaatactcaacaactaataggcccagagtttatttccaaatgagacactaaatttaaatagttttgagatttgatttcagcagaggcacacaaactcttaaaaacgagttattgtctgacattttgttttttctctaacttgaaaaataggtcacggtctagatcacattctcgatccagaggaaggcgatactctcgctcacgcagcaggagcaggggacgaaggtgagatcttgtttaactgaagtctttctgtattattattaaattcactggtagtccaacacagaaaaagctcattattttttttggagacagggtcttgctctgtcacccgggctggagtacaggggcataaccacgactcactgctgccttgatgatctcttgggtttaagcagttctcctacctcagcctcccgagtagctgggactgtaggcactgccaccatacccagctaatttttatttttgtagaaatggtcttgcactgtttcccaggctggtctcaagctcctgggctcaaacgatcctcccgcagtgctgggattatgggcatgagccactgcaccgttccccagttgaagtcttaacaggccaaaaaaaaaaaaaactgtggagatggacttaaagttctttattttaggtcaaggtcagcatctcctcgacgatcaagatctatctctcttcgtagatcaagatcagcttcactcagaagatctaggtctggttctataaaaggatcgaggtatttccagtatgtaacactttttttccttacttgtgtttggattgttcacatcttatcagtagagtgtcttaaggacataattcaaatggattgcttcagggaatatttgagatgtaaaagtttggaatttatgtgtaacttgtaacataaatattaccctagtttcacagatgaagaaaagggctactagagattttaaggcttgttaggccgtgtggtagacaagggtcccaagcaatacagctctactcaacactctgggtaggcatgttgctataaacttttctggcttcagattggatgatactagctctgaaagatggtaattgattttcccgacaaaaaggcctattagcaccaggaaaagagatcagaagcaagtagaaacatttctcatttttggaatgatggggttgatttgagacactggaaagttgactagggcagtagtgtgtacacagaaatgaatgtggattttttttttagaccgtttcagacctgaaaaaactaaagaaccagagctttactatttgtagaaggccttaaaaggagatagaatggaaaaaattgtaaaataagtattgcaacatgtaattaacaatattgttatctgtaccaacgataaaaccgtggtacggaatgctactgggagttaaattgctgtttaatagcacaaaacctttaaatgcaggaattctgaatcttgtggtctatttgagaaagctatgaaccatctctttagataaatttaaaagatagatatgtcagtctgatttggtttgtctgacagattgatggctctcaaacataacttgatccgggaagaagcctgacaaatggggggcggctttcttttcgtctggccttatcacctgaattagtctcagttcaggggtctggttattttcatcctgccttagcctcctgagtagctgggactgccattgtgtaccacagtgcccagctgagggatctgtgccttaagtgaggttagttttgcttccttcataccagtctcatcaaatgaaaaccatgtatttcccttggatattacacagtgtttgagaatgttatacctgtacagaaactaaccaattgagtgatagaaacaagtaattgaaatgggggttccttatgtctggtaacactttgtttgacagtgtgttagacagaataaggcaagtgttgcatcttgtttagttttagcttctttatgcctgaccaacctaatacagtgttgagtagttaaggaaattcctttggactgattgatataattgtgttttttcactttttttattaagatccccgtcgaggtcaagatcaagatccaggtctatttcacgaccaagaagcaggtagggtaaaaatttgattatccttttctagttatatggcaccaatatccaaagagttcaaagtgtttttaattgttgaaattttaagtgttaactctaaacttaggttttagtgggaacacagtaccttatttgtgtatgtcctatttattactggctgactttccctgaacaagggaatgtaaaactatagtgagaaagaagcttatgacttgggggattatattaaagaggcccttgttagaactgataggtgcatggagaagcatcctgaaatcgatgtgcttaaagcagaatgtaaaagattaatcatgatgtagtaattgagtcattttttgaaaaacagttgttgaaagattggcttttgttagcaacaactggtaggatgtttttcagtttaagtgcagtctgacattttaagcttaggacatttgggggttttacggtattggtgactacaagaaagggattggttagtactctttctttaatagaatttctcatgttttgacagccgatcaaagtccagatctccatctccaaaaagaaggtaagctaaatgttttgttgccaaatcttgcctgtcaagtgtggcctctgcagaatttgtttgcttactgctttgcagtctttgagctctttggagaattggtgctatatagattaaaatactatgctaagtttctgaaatactttttttttttgattcagtaacattagtttatacttttgctggaaatacttagtcataaaatgttagggtgattattaagatgtgattggtcctgtgagtacttggtagaaattttggtaagatagatgccttttccccacatgtacaatagatacaaagtgtggagaaaagtcttggaaatagttacctgcctagtgcttctttatgaccagaaaacttcaaatagttgtcatatttatctagtgcttcttaatgaccagaagacttcaaatagttgtcatatttaactgcaggttgaccttgcaattttgacaaggaggatagcctaatttttttttttttctgggatggagttttcgctctgtccccaggcttggagtgcagtggctcaatcttggctcactgcagcctccgattcccgggttcaagcaattatcctgtctcagcctcttgagcagttgggattacaggcacccaccgccaagcctggctaattttttgtatttctagtagagacggagtttcaccatgttggcgaggttggtcttaaactcctgatcttaggtgatcacctgcctcggcctctcccaaagtgctggggttacaggcgtgagccaccgtgcctggccagggtagcctaatcttaagccagggacaaaagatgaatatatgtaagtttcatgtcatttttaggtctttgctataggaaattagtaccttaggccacctttgaagttattgaaagttagtacatgtacatgagagtttcaattgacactaattggatccaaacctaatgtttttctttttagtcgttccccatcaggaagtcctcgcagaagtgcaagtcctgaaagaatggactgaagctctcaagttcaccctttagggaaaagttattttgtttacattattataagggatttgtgatgtctgtaaagtgtaacctaggaaagataattcaaccatctaatcaaaatggatctggattactatgtaaattcacagcagtaaggataatataaattttgttgaatgtatgaacatcatatggtctgaaaatgtgggtttttatttggcacatttaaataacatgtttctaactagatttttgatttgtgttcaatattaacacttcttaatttgatatatttgagagtcagacattataattgttaatccttattcatacatacctacattcagaattgaaaggtgttggttaagtcttgaacatcactattctatgcataaaacttggccaggatcttaagggactttgaaaattccatcttacccttgtagctctgggtaagatgacctgagtcccttatgatacagcctgaatgcatcatgacagatccttagttagctaatccgtttgaagttggtgttagtaggtattgtatgatcagtggtgaagcaagtaggaccactgatgtgtctaaatgagcatgacaggaactaaacgaaactgattaaatgtatgagaaatagaaactgatttctggatgatctttatactaattgcagctttcaggctactaggtggcatagtgttaattaggactccccaagatatggggagttctactctcaatggtcttgtttctttgctttctacattagttaaccagttttataccaaaaaatgcatgtttgaggaattgtctgaaattgggacaaaacaccttcatgtaaaccagctttgcaaaattttccagcccagatactcttcatctattcaaatggattgtcttattctgagcaaagacctgttgttaatcttcaagctaggttttgcagttcccaaccacaacattcttctattttgccaggctggtgcaaagtaattaaagatgtcaatcagaaatgtcaatgagactaaagtggttttgtaaatctcagctatatttagcaacactccatgtagctaatattttttggtagcatctggtagaccttagaatgttacatagccagtaggttctttattcaaattttaagtatcttaagaatagtagggcagtaacagttacttttgagagttttctggtcaagcttttaccaggcattctctagccttggtacaaaaaaaaaaaaaacctgctggttgcgcagatacctaggcttgtccattttatgcatttcagcaaagtcattggagactattgcaacttgggaatactggtctgcatcaagtttaattcggtagtttgaccgctagtatgttggaagttatttggattgtttttggaattttgactggctgaattatggttggtataaagttatgtgtataactggcaggcttatttatctgttgcacttggttagctttaattgttctgtattatttaaagataagtttactcaacaataaatctgcagagattgaacaaataatcctgatacttaatttttggaagtgggagctc

SEQ ID NO: 8312 - DNA, 3228 bp, Homo sapiens
gcgccgaggatgaggaggtgcaacagcggctccgggccgcgccgtcgctgctgctgctgctgctgtggctgctcgcggttcccggcgctaacgcggccccgcggtcggcgctctattcgccttccgacccgctgacgctgctgcaggcggacacggtgcgcggcgcggtgctgggctcccgcagcgcctgggccgtggagttcttcgcctcctggtgcggccactcgatcgccttcgccccgacgtggaaggcgctggccgaagacgtcaaacgctggaggccggccctgtatctcgccgccctggactgtgctgaggagaccaacagtgcagtctgcagagacttcaacatccctggcttcccgactgtgaggttcttcaaggcctttaccaagaacggctcgggagcagtatttccagtggctggtgctgacgtgcagacgctgcgggagaggctcattgacgccctggagtcccatcatgacacgtggcccccagcctgtcccccactggagcctgccaagctggaggagattgatggattctttgcgagaaataacgaagagtacctggctctgatctttgaaaagggaggctcctacctgggtagagaggtggctctggacctgtcccagcacaaaggcgtggcggtcgcgagggtcgtgaacacagaggccaatgtggtgagaaagtttggtgtcaccgacttcccctcttgctacctgctgttccggaatggctctgtctcccgagtccccgtgctcatggaatccaggtccttctataccgcttacctgcagagactctctgggctcaccagggaggctgcccagaccacagttgcaccaaccactgctaacaagatagctcccactgtttggaaattggcagatcgctccaagatctacatggctgacctggaatctgcactgcactacatcctgcggatagaagtgggcaggttcccggtcctggaagggcagcgcctgggtggccctgaaaaagtttgtggcagttctggccaagtatttcctgggcggcccttagtccagaactttctgcactccgtgaatgaatggctcaagaggcagaagagaaataaaattccctacagtttctttaaaactgccctggacgacaggaaagagggtgccgttcttgccaagaaggtgaactggattggctgccaggggagtgagccgcatttccggggctttccctgctcctgtgggtcctcttccacttctagactgtgcaggcagctcggatcaaaatgtagaccactcacaggaagcacgcaaggccaaggaggtcctcccagccatccgaggctagctgcactacttcttcggctgccgagactgcgcaagccacttcgagcagatgctgctgcctccatgcaccgggtggggagtcccaacgccgctgtcctctggctctggtctagccacaacagggtcaatgctcgcttgcaggtgcccccagcgaggacccccagttccccaaggtgcagtggccaccccgtgaactttgttctgcctgccacaatgaacgcctggatgtgcccgtgtgggacgtggaagccaccctcaacttcctcaaggcccacttctccccaagcaacatcatcctggacttccctgcagctgggtcagctgccggagggatgtgcagaatgtgcagccgccccagagctggcgatgggagccctggagctggaaagccggaattcaactctggaccctgggaagcctgagatgatgaagtcccccacaaacaccaccccacatgtgccggctgagggacctgaggcaagtcgacccccgaagctgcaccctggcctcagagctgcaccaggccaggagcctcctgagcacatggcagacgttcagaggaatgagcaggacgagccgcttgggcagtggcacttacgaagcgagacacaggggctgcattgctggctgagtccagggctgagaagaaccgcctctggggccctttggaggtcaggcgcgtgggccgcagctccaagcagctggtcgacatccctgaggccagctggaggcccgagctggacgggccgaggccagtggctgcaggtgctgggagggggcttctcttacctggacatcagcctctgtgtggggctctatccctgtccttcatgggcctgctggcatgtacacctacttccaggccaagataaggccctgaaccggatgctggccaccctgcagcctgaaccacctggggaggaggcgggagagggagctgccatctctaggcacctcaagccccctgaccccattccctcccctcccaccccttgctccttgtctggcctagaagtgtgggaaattcaggaaaacgagttgctccagtgaagcttcttggggttgctaggacagagagctcctttgacacaaaagacaggagcagggtccaggttgcctcgtgcagggagggcacgcccggcgagtggcgatagggcagctcagtccctggcctcttagcaccacattcctgtttttcagcttatttgaagtcctgcctcattctcactggagcctcagtctctcctgcttggtcttggccctcaactggggcaagtgaagccagaggagggtccccagctgggtgggctggaatggaactcctcactagctgcctgcgcgcccaccctgctccttccggacaatgaagaagcctttgcaccctgggaggaaggaccaccccgggccctctatgcctggccagcctccagctcctcagacctcctgggtggggtttggcttcagggtggggtttggaagcttctggaagtcgtgctggtctcccaggtgaggaaagccatggttgctgggctgtagggtgatggtttgtttggtgggacctgacgagttggtggcatgggaaggatgtgggtctctagtgccttgccctggcttagttgaaggagaagatggctgttttcacttccccccatagagctctgctccctctgagcctggtcttttgtccttttttattttggtctccaagatgaatgctcatctttggagggtgccaggtagaagctagggaggggagtgtcttctctctccaggtttcaccttccagtgtgcagaagttagaagggtctggcgggggcagtgccttacacatgcttgattcccacgctaccccctgccttgggaggtgtgtggaataaattatttttgttaaggc

SEQ ID NO: 8313 - DNA, 400 bp, Homo sapiens
ggctcagtcctctccttcatccctctccaggcaaaaacaaagagtgtgaggccttcatttgcaactgcgaccgcaacgctgccatctgcttttcaaaagctccatataacaaggcacacaagaacctggacaccaagaagtattgtcagagttgaatatcacctctcaaaagcatcacctctatctgcctcatctcacactgtactctccaataaagcaccttgttgaaagacctcatgtttggatattgttttattctctgtctataaactaggtctctgcctactcttttatttttatgtatttattttttctaggtggagtcttgctctgtggcccaggtggatgagtgatgccaccttgcctcactgcaacctccgctcccgggctcaagcaatcc

SEQ ID NO: 8314 - DNA, 1051 bp, Homo sapiens
cctggcccacagctcacaacaactaccaggcgcagtctgctgtgcccctgcgccacgagacccacggcggggaggacgtggccgtcttctccaagggccccatggcgcacctgctgcacggcgtccacgagcagaactacgtcccccacgtgatggcgtatgcagcctgcatcggggccaacctcggccactgtgctcctgccagctcggcaggcagccttgctgcaggccccctgctgctcgctctggccctctaccccctgagcgtcctgttctgagggcccagggcccgggcacccacaagcccgtgacagatgccaacttcccacacggcagcccccccttcaaggggcagggaggtgggggcctcctcagcctctgcaactgcaagaaaggggacccaggaaaccaaagtctgccgcccacctcgctcccctctggaatcttccccaagggccaaacccacttctggcctccagcctttgctccctccccgctgccctttggccaacagggtagatttctcttgggcaggcagagagtacagactgcagacattctcaaagcctcttatttttctagcgaacgtatttctccagacccagaggccctgaagcctccgtggaacattctggatctgaccctcccagtctcatctcctgaccctcccactcccatctccttacctctggaaccccccaggccctacaatgctcatgtccctgtccccaggccagccctccttcaggggagttgaggtctttctcctcaggacaaggccttgctcactcactcactccaagaccaccagggtcccaggaagccggtgcctgggtggccatcctacccagcgtgcccaggccgggaagagccacctggcagggctcacactcctgggctctgaacacacacgccagctcctctctgaagcgactctcctgtttggaacggcaaaaaaaaatttttttttctctttttggtggtggttaaaagggaacacaaaacatttaaataaaactttccgaggacagagctgagtctttgtggtcag

SEQ ID NO: 8315 - DNA, 2450 bp, Homo sapiens
agagggtccgccatgttccccggcggcgccgccgcttggctctggtagccgccgcccccgcccccaaccccgcccggcccagagcctagccgagccccgggcccagcatggccgccccggagccggcccgggctgcaccgcccccacccccgcccccgccgccccctcccggggctgaccgcgtcgtcaaagctgtccctttccccccaacacatcgcttgacatctgaagaagtatttgatttggatgggatacccagggttgatgttctgaagaaccacttggtgaaagaaggtcgagtagatgaagaaattgcgcttagaattatcaatgagggtgctgccatccttcggagagagaaaaccatgatagaagtagaagctccaatcacagtgtgtggtgacatccatggccaattttttgatctgatgaaactttttgaagtaggaggatcacctgctaatacacgatacctttttcttggcgattatgtggacagaggttattttagtatagagcatgttctaggcactgaagacatatcgattaatcctcacaataatattaatgagtgtgtcttatatttatgggttctgaagattctatacccaagcacattatttcttctgagaggcaaccatgaatgcagacaccttactgaatattttacctttaagcaggaatgtaaaattaagtattcggaaagagtctatgaagcttgtatggaagcttttgatagtttgcctcttgctgcacttttaaaccaacagtttctttgtgttcatggtggactttcaccagaaatacacacactggatgatattaggagattagatagattcaaagagccacctgcatttggaccaatgtgtgacttgttatggtccgatccttctgaagattttggaaatgaaaaatcacaggaacattttagtcacaatacagttcgaggatgttcttatttttataactatccagcagtgtgtgaatttttgcaaaacaataatttgttatcgattattagagctcatgaagctcaagatgcaggctatagaatgtacagaaaaagtcaaactacagggttcccttcattaataacaattttttcggcacctaattacttagatgtctacaataataaagctgctgtattaaagtatgaaaataatgtgatgaatattcgacagtttaactgttctccacatccttactggttgcctaattttatggatgtcttcacgtggtctttaccgtttgttggagaaaaagtgacagaaatgttggtaaatgttctgagtatttgctctgatgatgaactaatgactgaaggtgaagaccagtttgatggttcagctgcagcccggaaagaaatcataagaaacaaaattcgagcaattggcaagatggcaagagtcttctctgttctcagggaggagagtgaaagtgtgctgacactcaagggcctgactcccacagggatgttgcctagtggagtgttagctggaggacggcagaccctgcaaagtggtaatgatgttatgcaacttgctgtgcctcagatggactggggcacacctcactcttttgctaacaattcacataatgcatgcagggaattccttctgttttttagttcctgtctcagcagctgacctagacagggtagtgtattagctagtgtctcattaatacgtgatcagggcagaaaactgatagaatgggtattcctttcaattgaaaataatggtcagttcctcagcttttcatgaaatgatatgggagcagctcatatcataatgtctgaaatatttatttattcatctgtctaattcacccttttcttttaaaagccccagtttcagaatgtgaatcagggatattcctgttactaaaatggaaatgtaattccaagtttcttttttaattttttaaatttatgtcattgtattggactatgcttatatttaaaactacttaatttagagttaactacctgcttaggccccagaacattacttatgcccttcagttaccaaaagatttgtgcaaggttttgtaccctggtaaatgatgccaaagtttgttttctgtggtgtttgtcaaatgttctatgtataattaactgtctgtaacatgctgtttccttcctctgcagatgtagctgctttcctaaatctgtctgtctttctttaggttagctgtatgtctgtaaaagtatgttcaattaaattactccatcagacacttgtctgtcttgcaatgtagaagcagctttgtagcaccttgttttgaggtttgctgcatttgttgctgcactttgtgcattctgaacatgaatgtaacattagatattaagtcattgttataaggggttgaatttaaatcctgtaagtcaaaattgaaagggtgttattaagtgtgcctttattttgcatgaaaataaaaagaat

SEQ ID NO: 8316 - DNA, 952 bp, Homo sapiens; identical to SEQ ID NO: 713

SEQ ID NO: 8317 - DNA, 996 bp, Homo sapiens
ccagttccagcccgcaccccgcgtcggtgcccgcgcccctccccgggccccgccatgggcctcaccgtgtccgcgctcttttcgcggatcttcgggaagaagcagatgcggattctcatggttggcttggatgcggctggcaagaccacaatcctgtacaaactgaagttgggggagattgtcaccaccatcccaaccataggcttcaatgtagaaacagtggaatataagaacatctgtttcacagtctgggacgtgggaggccaggacaagattcggcctctgtggcggcactacttccagaacactcagggcctcatctttgtggtggacagtaatgaccgggagcgggtccaagaatctgctgatgaactccagaagatgctgcaggaggacgagctgcgggatgcagtgctgctggtatttgccaacaagcaggacatgcccaacgccatgcccgtgagcgagctgactgacaagctggggctacagcacttacgcagccgcacgtggtatgtccaggccacctgtgccacccaaggcacaggtctgtacgatggtctggactggctgtcccacgagctgtcaaagcgctaaccagccaggggcaggcccctgatgcccggaagctcctgcgtgcatccccgggatgaccagactcccggactcctcaggcagtgccctttcctcccacttttcctcccccatagccacaggcctctgctcctgctcctgcctgcatgttctctctgttgttggagcctggagccttgctctctgggcacagaggggtccactctcctgcctgctgggacctatggaaggggcttcctggccaaggccccctcttccagaggaggagcagggatctgggtttccttttttttttctgttttgggtgtactctaggggccaggttgggagggggaaggtgagggcttcgggtggtgctataatgtggcactggatcttgagtaataaatttgctgtggtttg

SEQ ID NO: 8318 - DNA, 3178 bp, Homo sapiens; identical to SEQ ID NO: 4909
  misc_feature (1)..(3178): n=a,t,g or c

SEQ ID NO: 8319 - DNA, 3512 bp, Homo sapiens
cgagccacccagctgagaggagaggcgcccccggggacgcactgagattatgaggctctggcctccactggccactcactcgtgaccctttccaccacggcggagccttccaagcctacctcctgccgtgtggtgatctacctgcagcgggagatgtcgggggacacctgcctgtgcccagcctcaggggccaagcccaagctcagtggcttcaagggaggagggttgggcaacaagtatgtccagctcaacgtgggcggctctctgtactacaccactgtgcgggccctgacccgccacgacaccatgctcaaggccatgttcagtgggcgcatggaggtgctgaccgacaaagaaggctggatcctcatagaccgttgtggaaagcactttggcaccattttgaattacctccgagatgacaccatcaccctccctcagaaccggcaagaaatcaaggaattgatggctgaagcaaagtattacctcatccaggggctggtgaatatgtgccagagtgccctgcaggacaagaaggactcctaccagcctgtgtgcaacatccccatcatcacatccctaaaggaggaggagcggctcatcgaatcctccaccaagcccgtggtgaagctgctgtacaacagaagcaacaacaagtattcctacaccagcaactctgacgaccacctgctgaaaaacatcgagctgtttgacaagctctccctgcgcttcaacggccgcgtgctcttcatcaaggatgtcattggtgacgagatctgctgctggtccttttatggccagggccgtaagctggcagaggtgtgctgtacctccatcgtgtatgccacggagaagaagcagaccaaggtggaattcccagaggcccgaatctatgaggagacactcaacgtcctactctatgagactccccgcgtccccgacaactccttgttggaggccacaagccgtagccgcagccaggcttcccccagtgaagatgaggagacctttgaactgcgggaccgtgtccgccgcatccacgtcaagcgctacagcacttacgatgaccggcagctcggccaccagtctacccatcgcgactgaccagaccctcagggagtcagggcacgggaggccctatctcccatcctgtggaacccgccccattggccaccccatgctgctgctgcctgggtctctgctctagcacccagaggcatgacaggccctgctcagaggtcagagggtctgggcagaggagggaccacattcccctgccttgcccctgagcacttctggagactgcgtcctgtcctatctgctcaccatcacccttcctgcccgacggagctgcttctgctccctggggcatatggactgacccacctcctgctgagaaccttcccctaggccctgtgcagaagggctactgccccttaggcctcagctgggggaaaggcagttctggtgctgtagaggccctggtgcagaaagtgggacgtcctttttcctaaggtgtttaagcacaggcttgataagtttggtttttaaaaaataatctaggaaatgaataattctaaatctagtaatgaggaaactgagcatttcttttgccctccagggtgccaagaccctacatatgacagaacccttggcccttctccatgcctgtgggatctgtttctttaaagcactttgtactgttattcaggaggttgataatctccttgacccatgtctttctaccctaatccccacttccctgcagaatcaatctgagggaggggataaagaggaagcaataaaaaaaaaacatccgacagagcagctctggctttgccagcctggccagcagctcagagtgcaccgaggagggaaggatggctaagctgggaccggcagtcctcacagggtgcctgtgagaaaggacattttacccccacatcatagtcacatcactgactcctaggtctagcacgactgctctttgtgatcctcttgagtacccttggcttccagccatgctgtcctcacatacggtaaagccaaagagctgtcacatgggccagaaacatgagccacggcaggaagaccgtggagcccgtgggcactgcatggtgttggctggcatgcccatcagctgaggacagcaaactcccagcagcccctacagaggtggcacatgcttggccacacatctactccctgcccacaccatctatgctcttggttggtgctggctgggatggcggttctgcccagtggtgtctctgagcgcgggatgacaggagcaaccgaagcaccctgaaggccttcactccttgttgggtaactcagccatggagatgccaagcactagccaggaggtgagttcctctttagggctttggttttcattcctttttgtttggcttggccaaaccagaattcagcttatctgaattattttccaaaggaatgctgtcagggagggactgttctgccagcctaacaaagcaacgtagccacgtatagtacccacttctgctctttggagagaacacaggttatcaagttcatctctcttgactactcttatgatagctgatgccacagagcctatgggcaaatgccagacccagggttagacacaaggacctgaagtgacatgacggcgggacaggggaaatgtgactttctaattaggcattttatgttagtcacagtcttgaatgtataaacagcactaagactctcaggtcaggtaccttggtgatcagctactagttcttccagccctcattgaggtaacaagataaagacaaatccacttctttggccaaattcaggctttggctttatgactttcccacagagactggaatgcgtcagcctgagaccactggcctattttctcagctgccctcttgaggtcctttaacactcaaattcccagctccccactgaggtgttgtgatgcttgccttttgacctccccatcccctttagtccctgcttactactttgacattcacatcctcagtgtctcagtcttttttgccgagaaagcacagtagtctgggactgggcatttatcttctctgactgaaaatctctccttggtcttaaggaaaatactaacattgaactcactgacatgatcttagcttctttaatcagactttgtgacttaaaagtttgggggttttctttgaaagtttccagccctattcagaaagcaactcttggctgtgtgcatttttcaactccaagcagcccaggggtaagtaaacaaagtatggatgaaggtcagattttcttgtcagtttctgagaaacctggcagcctgctgttaacaacacaggccagtattgggttttattgaatttggtatgtgaccaaggtcggcctaaaggatggcgcaggtcctgggcaggaaagaatttttcctttatcacataactgtaatatttggttgctcagcataagtgatggaagcaaacactaatttctaataaaattgtgttaaactc

SEQ ID NO: 8320 - DNA, 254 bp, Homo sapiens; identical to SEQ ID NO: 172

SEQ ID NO: 8321 - DNA, 1316 bp, Homo sapiens
cccgcagctcggagcccggagcgtcctcggcggctgtcggttttcaccatggagcagctgagctcagcaaacacccgcttcgccttggacctgttcctggcgttgagtgagaacaatccggctggaaacatcttcatctctcccttcagcatttcatctgctatggccatggtttttctggggaccagaggtaacacggcagcacagctgtccaagactttccatttcaacacggttgaagaggttcattcaagattccagagtctgaatgctgatatcaacaaacgtggagcgtcttatattctgaaacttgctaatagattatatggagagaaaacttacaatttccttcctgagttcttggtttcgactcagaaaacatatggtgctgacctggccagtgtggattttcagcatgcctctgaagatgcaaggaagaccataaaccagtgggtcaaaggacagacagaaggaaaaattccggaactgttggcttcgggcatggttgataacatgaccaaacttgtgctagtaaatgccatctatttcaagggaaactggaaggataaattcatgaaagaagccacgacgaatgcaccattcagattgaataagaaagacagaaaaactgtgaaaatgatgtatcagaagaaaaaatttgcatatggctacatcgaggaccttaagtgccgtgtgctggaactgccttaccaaggcgaggagctcagcatggtcatcctgctgccggatgacattgaggacgagtccacgggcctgaagaagattgaggaacagttgactttggaaaagttgcatgagtggactaaacctgagaatctcgatttcattgaagttaatgtcagcttgcccaggttcaaactggaagagagttacactctcaactccgacctcgcccgcctaggtgtgcaggatctctttaacagtagcaaggctgatctgtctggcatgtcaggagccagagatatttttatatcaaaaattgtccacaagtcatttgtggaagtgaatgaagagggaacagaggcggcagctgccacagcaggcatcgcaactttctgcatgttgatgcccgaagaaaatttcactgccgaccatccattccttttctttattcggcataattcctcaggtagcatcctattcttggggagattttcttccccttagaagaaagagactgtagcaatacaaaaatcaagcttagtgctttattacctgagtttttaatagagccaatatgtcttatatctttaccaataaaaccactgtccagaaacaaaaaaaaaaaaaaaaaa

SEQ ID NO: 8322 - DNA, 1481 bp, Homo sapiens
ctctggaacattagacaggatgctgatcttctggacaatcacacttttcctgctgggagcagccaaaggaaaagaagtttgctatgaggacctcgggtgcttttctgacactgagccctggggcgggacagcaatcaggcccctgaaaattctcccctggagccctgagaagatcggcacccgcttcctgctgtacaccaatgaaaacccaaacaactttcaaattctcctcctctctgatccatcaacaattgaggcatcaaattttcaaatggacagaaagacccggttcatcatccatggcttcatagacaaaggagatgagagctgggtgacagacatgtgcaagaaactgttcgaggtggaggaggtgaactgcatctgcgtggactggaagaagggctcccaagccacctacacacaggctgccaacaacgtgcgagtggtgggcgcccaggtggcccagatgctcgacatcctcttgacagagtatagctaccccccttccaaagttcacctcattggccacagcctgggagcccacgtggctggagaggcaggaagcaagactccaggcctgagcaggattacagggttggatcctgtagaagcaagtttcgagagtactcctgaagaggtgcgacttgatccctctgatgctgactttgttgatgtgattcacacggatgcagctcccctgatcccattcttgggttttggaacgaaccaacagatgggtcatcttgacttcttccccaatggaggagagagcatgccgggatgcaagaagaatgccctgtctcagatcgtggatctagatggcatctgggcgggaacccgggactttgtggcttgcaatcacctaagaagctacaagtattacttggaaagcatcctcaatcccgatgggtttgctgcatatccctgcacttcctacaagtcctttgagtctgacaagtgcttcccgtgtccagatcaaggatgcccacagatgggtcactatgctgataaatttgctggcaggacaagtgaagagcagcagaaattcttcttgaacacaggagaggctagcaatttcgctcgctggagatatggggtttccatcacactgtctggaagaacagccactggtcagatcaaagttgctttgtttggaaataagggaaacactcaccagtacagcatcttcagggggattctcaaaccaggctcaacccattcctatgagtttgatgcaaagctggatgttggaacaattgagaaagtcaagtttctttggaataacaatgtgataaatccaaccctccccaaagtgggtgccaccaagatcactgtgcaaaagggagaagagaagacagtgtacaacttctgtagcgaagacacagtgcgggaagacacgctgctcaccctcacgccctgctaagctcccggggcgacgaggctgctgcgttcacactaataaaatccactggtgcatctgt

SEQ ID NO: 8323 - DNA, 1450 bp, Homo sapiens
atgctgcccccttggaccctcggccttctcctgctggccacagtcagaggaaaagaggtctgctacggacaacttggctgcttttctgatgaaaaaccatgggcaggaacccttcagcgacctgtaaaattacttccctggtcccccgaggacattgacacccgctttcttctgtacacaaatgaaaatccaaacaacttccaactaatcactggcacggaaccagacaccattgaggcttcaaacttccaactggaccgcaagacacgcttcatcatccatggcttcttagacaaggcggaggacagctggccatcggacatgtgcaagaaaatgtttgaagtggagaaggtgaactgcatctgtgtggactggaggcacgggtcccgggcaatgtacacccaagccgtgcaaaacattcgggttgttggggcggagacagctttcttaatacaagcactgtcgacgcagctagggtacagccttgaggacgtgcatgtcatcggccacagcctgggcgcgcacacggccgcggaggcgggcaggaggctggggggccgcgtgggcaggatcacagggctggatccagcagggccgtgcttccaggatgaacctgaggaggttcggttggatccatctgacgccgtgtttgtggatgtgattcacacagattcttctcccatagttccttccctaggtttcggaatgagccaaaaggtgggccatctggatttctttccaaatggaggaaaggaaatgcccggatgtaagaaaaatgtcctttcaaccattactgatattgatggaatatgggaaggaattggtggctttgtgtcttgcaatcacctaagaagcttcgagtattactcaagcagcgtcctcaaccctgatggcttcctgggctatccctgtgcctcctacgatgagtttcaggagagtaagtgtttcccttgtccagctgaaggatgccccaaaatggggcactatgctgaccaatttaaggggaaaacaagtgctgtggaacaaacctttttcctgaacacaggagagagtggtaactttactagttggagatataaggtatcagtcacactttctggaaaagagaaagtgaatgggtacatcaggattgctttgtatggaagtaatgaaaactcgaaacaatatgagattttcaaaggatccctcaaaccagatgcaagtcacacgtgtgctattgatgtggattttaatgttggaaaaatacagaaagttaaattcctctggaacaaacgtgggataaatctatctgagcccaaactgggggcttcccaaatcacagtgcaaagtggtgaagatgggactgagtataatttttgtagcagcgacactgtggaagaaaacgtcttgcaatctctttacccttgttaaaaacgtggtgcggctattgcggtaataaaatctttaatgc

SEQ ID NO: 8324 - DNA, 2304 bp, Homo sapiens; identical to SEQ ID NO: 3542

SEQ ID NO: 8325 - DNA, 1350 bp, Homo sapiens
cgccactgccacccctcccagactgtggacgggaggatggagtcgatggccgtcgctaccgacggcggggagaggccgggggtcccagcgggctcaggtctgtcggcttcccagcgtcgggcggagctgcgtcggagaaagctgctcatgaactcggaacagcgcatcaaccggatcatgggctttcacaggcccgggagcggcgcggaagaagaaagtcaaacaaaatcaaagcagcaggacagtgataaactgaactccctcagcgttccttccgtttcaaagcgagtagtgctgggtgattcagtcagtacaggaacaactgaccagcagggtggtgtggccgaggtaaaggggacccaactgggagacaaattggactcgttcattaaaccacctgagtgcagtagtgatgtcaaccttgagctccggcagcggaacagaggggacctgacagcggactcggtccagaggggttcccgccatggcctagagcagtacctttccagattcgaagaagcaatgaagctaaggaaacagctgattagtgaaaaacccagtcaagaggatggaaatacaacagaagaatttgactcttttcgaatatttagattggtgggatgtgctcttcttgctcttggagtcagagcttttgtttgcaaatacttgtccatatttgctccatttcttactttacaacttgcgtacatgggattatacaaatattttcccaagagtgaaaagaagataaagacaacagtactaacagctgcacttctattgtcgggaattcctgccgaagtgataaatcgatcaatggatacctatagcaaaatgggcgaagtcttcacagatctctgtgtctactttttcacttttatcttttgtcatgaactgcttgattattggggctctgaagtaccatgaagcctgtagaactgagaaggagaagcttacgaaaaaaatcctcttctatattgcagtgtctctaaaggaggcaaattggtttacaccttcatgtaattcttttactttaggggttgtaaagctactttattagatatagaatggcagattctctgatttaaaagggctgagtttgtattattactgatatgaagaatagagtaccaatgtcattaattgatttttcttgttaatcagaattcctattctgtacctttcctctaacttctcagatttgtaattcttcttttcgggagctgagctagtgcttttaggagaacagataaatgtggtctcagccagccctagagactgcttcttgtgtttgtgtcattctgtcctgagaaatgaagtcatctgaaaaataaaaatgcagaaacccaa

SEQ ID NO: 8326 - DNA, 1659 bp, Homo sapiens
agcagtacaggcagaagctggcggctcatggcttcgtgcccatggggtcaggaacagggagcgaggagcccctcggaggagcctccagaggaggaaatccccaaggaggatgggatcttggtgctgagccgccacaccctgggcctggccctgcgggagcaccctgccctgctggtggaattctatgccccgtggtgtgggcactgccaggccctggcccccgagtacagcaaggcagctgccgtgctcgcggccgagtcaatggtggtcacgctggccaaggtggatgggcccgcgcagcgcgagctggctgaggagtttggtgtgacggagtaccctacgctcaagttcttccgcaatgggaaccgcacgcaccccgaggagtacacaggaccacgggacgctgagggcattgccgagtggctgcgacggcgggtggggcccagtgccatgcggctggaggatgaggcggccgcccaggcgctgatcggtggccgggacctagtggtcattggcttcttccaggacctgcaggacgaggacgtggccaccttcttggccttggcccaggacgccctggacatgacctttggcctcacagaccggccgcggctctttcagcagtttggcctcaccaaggacactgtggttctcttcaagaagtttgatgaggggcgggcagacttccccgtggacgaggagcttggcctggacctgggggatctgtcgcgcttcctggtcacacacagcatgcgcctggtcacggagttcaacagccagacgtctgccaagatcttcgcggccaggatcctcaaccacctgctgctgtttgtcaaccagacgctggctgcgcaccgggagctcctagcgggctttggggaggcagctccccgcttccgggggcaggtgctgttcgtggtggtggacgtggcggccgacaatgagcacgtgctgcagtactttggactcaaggctgaggcagcccccactctgcgcttggtcaaccttgaaaccactaagaagtatgcgcctgtggatgggggccctgtcaccgcagcgtccatcactgctttctgccatgcagtcctcaacggccaagtcaagccctatctcctgagccaggagataccccctgattgggatcagcggccagttaagaccctcgtgggcaagaattttgagcaggtggcttttgacgaaaccaagaatgtgtttgtcaagttctatgccccgtggtgcacccactgcaaggagatggcccctgcctgggaggcattggctgagaagtaccaagaccacgaggacatcatcattgctgagctggatgccacggccaacgagctggatgccttcgctgtgcacggcttccctactctcaagtacttcccagcagggccaggtcggaaggtgattgaatacaaaagcaccagggacctggagactttctccaagttcctggacaacgggggcgtgctgcccacggaggagtccccggaggagccagcagccccgttcccggagccaccggccaactccactatggggtccaaggaggaactgtagctgcccccgtgtcacccccgccatcactgctggacaggagccacccccttgggtaccagagggagctgtgcattgtgaataaagagtgagcttggt

SEQ ID NO: 8327 - DNA, 1143 bp, Homo sapiens
ccggggaccatgttgcttccgaacatcctgctcaccggtacaccaggggttggaaaaaccacactaggcaaagaacttgcgtcaaaatcaggactgaaatacattaatgtgggtgatttagctcgagaagtctgatcatcggatatcatggagtctggcaagacggcttctcccaagagcatgccgaaagatgcacagatgatggcacaaatcctgaaggatatggggattacagaatatgagccaagagttataaatcagatgttggagtttgccttccgatatgtgaccacaattctagatgatgcaaaaatttattcaagccatgctaagaaagctactgttgatgcagatgatgtgcgattggcaatccagtgccgcgctgatcagtcttttacctctcctcccccaagagattttttattagatattgcaaggcaaagaaatcaaacccctttgccattgatcaagccatattcaggtcctaggttgccacctgatagatactgcttaacagctccaaactataggctgaaatctttacagaaaaaggcatcaacttctgcgggaagaataacagtcccgcggttaagtgttggttcagttactagcagaccaagtactcccacactaggcacaccaaccccacagaccatgtctgtttcaactaaagtagggactcccatgtccctcacaggtcaaaggtttacagtacagatgcctacttctcagtctccagctgtaaaagcttcaattcctgcaacctcagcagttcagaatgttctgattaatccatcattaatcgggtccaaaaacattcttattaccactaatatgatgtcatcacaaaatactgccaatgaatcatcaaatgcattgaaaagaaaacgtgaagatgatgatgatgacgatgatgatgatgatgactatgataatctgtaatctagccttgctgaatgtaacatgtatacttggtcttgaattcattgtactgatattaaacatgcatgctggatgttttcaagttgtgttttagaaaactaataataatgagtaaacacagttaccatacttttcaattgaaatgaaggtttttcatcagccttaaaagtgtaagaaaaataaagttgtcattcattcgat

SEQ ID NO: 8328 - DNA, 1556 bp, Homo sapiens
ccaaattattgtatctcacagtgtggggaaaaggaagagagatcagattgttactgtgtctgtgtagaaagaagtagacataggagactccattttgttatgtactaagaaaaattcttctgccttgagattctgttaatctataaccttaccccccaaccccgtgctctctgaaacatgtgctgtgtcctctcagaattgcctgttttttgtgctcctccgagctcgctgttcgtccgggttttttacgttttaatttccaggacttgaactgccatgtcctctgaagaaggaaagctcttcgtgggagggctcaactttaacaccgacgagcaggcactggaagaccacttcagcagtttcggacctatctctgaggtggtcgttgtcaaggaccgggagactcagcggtccaggggttttggtttcatcaccttcaccaacccagagcatgcttcagttgccatgagagccatgaacggagagtctctggatggtcgtcagatccgtgtggatcatgcaggcaagtctgctcggggaaccagaggaggtggctttggggcccatgggcgtggtcgcagctactctagaggtggtggggaccagggctatgggagtggcaggtattatgacagtcgacctggagggtatggatatggatatggacgttccagagactataatggcagaaaccagggtggttatgaccgctactcaggaggaaattacagagacaattatgacaactgaaatgagacatgcacataatatagatacacaaggaataatttctgatccaggatcgtccttccaaatggctgtatttataaaggtttttggagctgcactgaagcatcttattttatagtatatcaaccttttgtttttaaattgacctgccaaggtagctgaagaccttttagacagttcccatctttttttttaaattttttctgcctatttaaagacaaattatgggacgtttgtagaacctgagtatttttctttttaccagttttttagtttgagctcttaggtttattggagctagcaataattggttctggcaagtttggccagactgacttcaaaaaattaatgtgtatccagggacattttaaaacctgtacacagtgtttattgtggttaggaagcaatttcccaatgtacctataagaaatgtgcatcaagccagcctgaccaacatggtgaaaccccatctgtactaaacataaaaaaattagcctggcatggtggtgtacgcctgtaatcccagtgacttgggaggctgaggcaggagaatcgcttgaacccgggaggcggaggttgcagtgagctaagatcgcgccactgtactccagcctggacaacagcgagagctccatctcaaaaaaaaaaggaaatgtgtatcaagaacatgattatccagcggtattttctaattcagatcatcaaactgattatatagaagagttggctttaaaatgtttgcaaatgtcgatgttgagaatggtatttcttcagttttattttaggatttctatagtttgatgatc

SEQ ID NO: 8329 - DNA, 2129 bp, Homo sapiens
ggcgctttgtgttctcatcggagctgcatgggaagtctgcgtacagcaaagtgacctgcatgcctcaccttatggaaaggatggtgggctctggcctcctgtggctggccttggtctcctgcattctgacccaggcatctgcagtgcagcgaggttatggaaaccccattgaagccagttcgtatgggctggacctggactgcggagctcctggcaccccagaggctcatgtctgttttgacccctgtcagaattacaccctcctggatgaacccttccgaagcacagagaactcagcagggtcccaggggtgcgataaaaacatgagcggctggtaccgctttgtaggggaaggaggagtaaggatgtcggagacctgtgtccaggtgcaccgatgccagacagacgctcccatgtggctgaatgggacccaccctgcccttggggatggcatcaccaaccacactgcctgtgcccattggagtggcaactgctgtttctggaaaacagaggtgctggtgaaggcctgcccaggcgggtaccatgtgtaccggttggaaggcactccctggtgtaatctgagatactgcacagacccatccactgtggaggacaagtgtgagaaggcctgccgccccgaggaggagtgccttgccctcaacagcacctggggctgtttctgcagacaggacctcaatagttctgatgtccacagtttgcagcctcagctagactgtgggcccagggagatcaaggtgaaggtggacaaatgtttgctgggaggcctgggtttgggggaggaggtcattgcctacctgcgagacccaaactgcagcagcatcttgcagacagaggagaggaactgggtatctgtgaccagccccgtccaggctagtgcctgcaggaacattctggagagaaatcaaacccatgccatctacaaaaacaccctctccttggtcaatgatttcatcatcagagacaccatcctcaacatcaacttccaatgtgcctacccactggacatgaaagtcagcctccaagctgccttgcagcccattgtaagttccctgaacgtcagtgtggacgggaatggagagttcattgtcaggatggccctcttccaagaccagaactacacgaatccttacgaaggggatgcagttgaactgtctgttgagtccgtgctgtatgtgggtgccatcttggaacaaggggacacctcccggtttaacctggtgttgaggaactgctatgccacccccactgaagacaaggctgaccttgtgaagtatttcatcatcagaaacagctgctcaaatcagcgtgattccaccatccacgtggaggagaatgggcagtcctcggaaagccggttctcagttcagatgttcatgtttgctggacattatgacctagttttcctgcattgtgagattcatctctgtgattctcttaatgaacagtgccagccttcttgctcaagaagtcaagtccgcagtgaagtaccggccatcgacctagcccgggttctagatttggggcccatcactcggagaggtgcacagtctcccggtgtcatgaatggaacccctagcactgcagggttcctggtggcctggcctatggtcctcctgactgtcctcctggcttggctgttctgagagctccgctgagcatctggccttgaagtttgtgttcttccctctggcaatggctcccttcagcacttctgctttccactccaattcacacaggcttggtattaacagaatcaaggccaggctaggttaggaaaagggaagagctttcaccttctttggggctctcggctgggcgcagtggctcatgcctgtaatcccagcattttgggaggctgaggcaggtggatcacctgaggtcagcagttcaaaatcagcctggccaaaatgctgaaactccgtctctactaaaaatacaaaaattagccaggcatggtggcaggcgcctgtaatcccagctactcgggaggccaaggcaggagaattgctcgaactcagggggtggaggttgcagtgagttgagattgtgccattgcactccagcctgggcaacagagcaagactctgtctcaggaaaaaaaaaaaaaa

SEQ ID NO: 8330 - DNA, 1496 bp, Homo sapiens
gcacgaggcctgcactttgtcaagtttgccatcgacagtgaccagctccatcagctctgggagaaggaccagctcaacatggccaagaacacctggcccattctgaagggctttcaggaggggcccctcaacttcgctcccaccttcaagtttgatgtgggtaccaacaaatacgataccagtgccaagaaacggaagccagcttggacagaccgtatcctatggaaggtcaaggctccaggtgggggtcccagcccctcaggacggaagagccaccgactccaggtgacgcagcacagctaccgcagccacatggaatacacagtcagcgaccacaagcctgtggctgcccagttcctcctgcagtttgccttcagggacgacatgccactggtgcggctggaggtggcagatgagtgggtgcggcccgagcaggcggtggtgaggtaccgcatggaaacagtgttcgcccgcagctcctgggactggatcggcttataccgggtgggtttccgccattgcaaggactatgtggcttatgtctgggccaaacatgaagatgtggatgggaatacctaccaggtaacattcagtgaggaatcactgcccaagggccatggagacttcatcctgggctactatagtcacaaccacagcatcctcatcggcatcactgaacccttccagatctcgctgccttcctcggagttggccagcagcagcacagacagctcaggcaccagctcagagggagaggatgacagcacactggagctccttgcacccaagtcccgcagccccagtcctggcaagtccaagcgacaccgcagccgcagcccgggactggccaggttccctgggcttgccctacggccctcatcccgtgaacgccgtggtgccagccgtagcccctcaccccagagccgccgcctgtcccgagtggctcctgacaggagcagtaatggcagcagccggggcagtagtgaagaggggccctctgggttgcctggcccctgggccttcccaccagctgtgcctcgaagcctgggcctgttgcccgccttgcgcctagagactgtagaccctggtggtggtggctcctggggacctgatcgggaggccctggcgcccaacagcctgtctcctagtccccagggccatcgggggctggaggaagggggcctggggccctgagggtggggtaggcagatgggccaaggtgaccaccattctgcctcaatcttttgcaagcccacctgcctctctcctgctgctcctccagctgtatctgcacctgcctctctgtcctggccaggggtggacaactggggtcccccaaaactcagtcctggcacctcaactgtgacaatcagcaaagccccacccaggcccccatctgggatgatgggagagctctggcagatgtcccaatcctggaggtcatccattaggaattaaattctccagcctcaaaaaaaaaaaaaaaaaaaaaaaaa

SEQ ID NO: 8331 - DNA, 3490 bp, Homo sapiens
gcggcgcggagcgggcgtgctgagccccggccgccggcccggcatgggcgtctcccgcgggccctccgccggccggggctagggccggatggagccgcgggacggtagccccgaggcccggagcagcgactccgagtcggcttccgcctcgtccagcggctccgagcgcgacgccggtcccgagccggacaaggcgccgcggcgactcaacaagcggcgcttcccggggctgcggctcttcgggcacaggaaagccatcaccaagtcgggcctccagcacctggccccccctccgcccacccctggggccccgtgcagcgagtcagagcggcagatccggagtacagtggactggagcgagtcagcgacatatggggagcacatctggttcgagaccaacgtgtccggggacttctgctacgttggggagcagtactgtgtagccaggatgctgaagtcagtgtctcgaagaaagtgcgcagcctgcaagattgtggtgcacacgccctgcatcgagcagctggagaagataaatttccgctgtaagccgtccttccgtgaatcaggctccaggaatgtccgcgagccaacctttgtacggcaccactgggtacacagacgacgccaggacggcaagtgtcggcactgtgggaagggattccagcagaagttcaccttccacagcaaggagattgtggccatcagctgctcgtggtgcaagcaggcataccacagcaaggtgtcctgcttcatgctgcagcagatcgaggagccgtgctcgctgggggtccacgcagccgtggtcatcccgcccacctggatcctccgcgcccggaggccccagaatactctgaaagcaagcaagaagaagaagagggcatccttcaagaggaagtccagcaagaaagggcctgaggagggccgctggagacccttcatcatcaggcccaccccctccccgctcatgaagcccctgctggtgtttgtgaaccccaagagtgggggcaaccagggtgcaaagatcatccagtctttcctctggtatctcaatccccgacaagtcttcgacctgagccagggagggcccaaggaggcgctggagatgtaccgcaaagtgcacaacctgcggatcctggcgtgcgggggcgacggcacggtgggctggatcctctccaccctggaccagctacgcctgaagccgccaccccctgttgccatcctgcccctgggtactggcaacgacttggcccgaaccctcaactggggtgggggctacacagatgagcctgtgtccaagatcctctcccacgtggaggaggggaacgtggtacagctggaccgctgggacctccacgctgagcccaaccccgaggcagggcctgaggaccgagatgaaggcgccaccgaccggttgcccctggatgtcttcaacaactacttcagcctgggctttgacgcccacgtcaccctggagttccacgagtctcgagaggccaacccagagaaattcaacagccgctttcggaataagatgttctacgccgggacagctttctctgacttcctgatgggcagctccaaggacctggccaagcacatccgagtggtgtgtgatggaatggacttgactcccaagatccaggacctgaaaccccagtgtgttgttttcctgaacatccccaggtactgtgcgggcaccatgccctggggccaccctggggagcaccacgactttgagccccagcggcatgacgacggctacctcgaggtcattggcttcaccatgacgtcgttggccgcgctgcaggtgggcggacacggcgagcggctgacgcagtgtcgcgaggtggtgctcaccacatccaaggccatcccggtgcaggtggatggcgagccctgcaagcttgcagcctcacgcatccgcatcgccctgcgcaaccaggccaccatggtgcagaaggccaagcggcggagcgccgcccccctgcacagcgaccagcagccggtgccagagcagttgcgcatccaggtgagtcgcgtcagcatgcacgactatgaggccctgcactacgacaaggagcagctcaaggaggcctctgtgccgctgggcactgtggtggtcccaggagacagtgacctagagctctgccgtgcccacattgagagactccagcaggagcccgatggtgctggagccaagtccccgacatgccagaaactgtcccccaagtggtgcttcctggacgccaccactgccagccgcttctacaggatcgaccgagcccaggagcacctcaactatgtgactgagatcgcacaggatgagatttatatcctggaccctgagctgctgggggcatcggcccggcctgacctcccaacccccacttcccctctccccacctcaccctgctcacccacgccccggtcactgcaaggggatgctgcaccccctcaaggtgaagagctgattgaggctgccaagaggaacgacttctgtaagctccaggagctgcaccgagctgggggcgacctcatgcaccgagacgagcagagtcgcacgctcctgcaccacgcagtcagcactggcagcaaggatgtggtccgctacctgctggaccacgcccccccagagatccttgatgcggtggaggaaaacggggagacctgtttgcaccaagcagcggccctgggccagcgcaccatctgccactacatcgtggaggccggggcctcgctcatgaagacagaccagcagggcgacactccccggcagcgggctgagaaggctcaggacaccgagctggccgcctacctggagaaccggcagcactaccagatgatccagcgggaggaccaggagacggctgtgtagcgggccgcccacgggcagcaggagggacaatgcggccaggggacgagcgccttccttgcccacctcactgccacattccagtgggacggccacggggggacctaggccccagggaaagagccccatgccgccccctaaggagccgcccagacctagggctggactcaggagctgggggggcctcacctgttcccctgaggaccccgccggacccggaggctcacagggaacaagacacggctgggttggatatgcctttgccggggttctggggcagggcgctccctggccgcagcagatgccctcccaggagtggaggggctggagagggggaggccttcgggaagaggcttcctgggccccctggtcttcggccgggtccccagcccccgctcctgccccaccccacctcctccgggcttcctcccggaaactcagcgcctgctgcacttgcctgccctgccttgcttggcacccgctccggcgaccctccccgctcccctgtcatttcatcgcggactgtgcggcctgggggtggggggcgggactctcacggtgacatgtttacagctgggtgtgactcagtaaagtggatttttttttctttaaaaaaaa

SEQ ID NO: 8332 - DNA, 5767 bp, Homo sapiens; identical to SEQ ID NO: 6888

SEQ ID NO: 8333 - DNA, 1451 bp, Homo sapiens
tctctctaaccgcgccagtgtgcctccgactcggaacggcttccgcggccggggcagcgagggccgggggcggcgggcgggatgagtgcggtgtgcggtggagcggcgcggatgctgcggacgccgggacgccacggctacgccgccgagttctccccgtacctgccgggccgcctggcctgcgccaccgcgcagcactacggcatcgcgggctgtggaaccctactaatattggatccagatgaagctgggctaaggctttttagaagctttgactggaatgatggtttgtttgatgtgacttggagtgagaacaacgaacatgtcctcatcacctgtagtggcgatggctcgctgcagctctgggacactgccaaagctgcagggccactgcaagtctataaagaacacgctcaggaggtgtatagtgttgattggagccaaaccagaggtgaacagcttgtggtgtctggctcatgggatcaaactgtcaaattgtgggatccaactgttggaaagtctctgtgcacctttagaggccatgaaagtattatttatagcacaatctggtctccccacatccctggttgttttgcttcagcctcaggtgatcagactctgagaatatgggatgtgaaggcagcaggagtaagaatcgtgattcctgcacatcaggcagaaatcttgagttgtgactggtgtaaatacaatgagaatttgctggtgaccggggcggttgactgtagtttgagaggctgggacttaaggaatgtacgacaaccagtgtttgaacttcttggtcatacctatgctattaggagggtgaaattttcaccatttcatgcttctgtgctggcctcttgctcgtatgattttactgtaagattctggaacttttcaaagcctgactctcttcttgaaacagtggagcatcatacagagtttacttgtggtttagacttcagtcttcagagccccactcaggtggctgactgttcttgggatgaaacaataaagatctatgaccctgcttgtcttactattcctgcttgagatacactactttggtcagaaacagaggatgttggctgaagaactgcctaacagcaaataaattaactatggaaaacatagacattatgcttttatatgctattcagatttcaaatctttccaatttaccctggaatcagttttgagggagctgataaagactttagctgactcgttaagcctgatacataagccatatttaaaattctaagaaataattaatgttatgatatatcttgtagtatctattaaaatgtagtctctgggtcataaaatggattaaaatatgggagatcagtaggttatacgtatatagatagtgatatatttcatttttaatttgtcatttttgatgtaaaatataatcactgctgtgataaataaactatctattgatc

SEQ ID NO: 8334 - DNA, 1675 bp, Homo sapiens
gtgagacagagacaaatgaacccccctctaaagtcatttaactaatagccagcacatcccttccccaaactgtcaattgaaatcttaactgaaagttttactgaataataccaagctaattgctgttgggcacacctggatggctttgcacctggtgttgaacctgctgaagcaggtggatgctcaagattacgtgcaaggaatccctcccatctggtactaaaatttcagtgtgttctgagtgtcttttaaaccaaaatggaaatacagatacagggctgtagtattcagtaatgtgtctgctccttgttgggcagacaccagcggtgtgcagggagagaccaagtaccatctttatctacacttgggctggcttgtggagaagggctgctttttttcagtcctacattccttcattttttttttcattcttgaattcattgttttgtgggatctaagacccaggggtcatttgagaggtttgacagtatcttttctgaccagttgccacatgacttgcttgaccctgagcctgtggaaatggcatagggaccagtctactacccactgggcctggtgtgtagagggggagagggtagcaaggtgcttctctacgcccatgacttgggagcaggtcttggcctccttcatgagagtctagtgccatgtcctgtcccatgatctggaccctgggactgtcttggcatcttaactgcagtttcaatgaggcagagggcaaagagagaccaagatcagaggggttcattatacccctggctagagaacccagctactgacatgcaagcagcttggggctggctggacacaggtactaggcccattgtttccaggtgaagctttcatcacagaacagtgttgtctccacctggccttagatggcacgccatgattcgggcctggatagactgcctgcgtccttaccactgatctggccaagaatgaggccctcccaacactttcactccctctccaagccttgatgggacctccacttatttaggcctcatgtgctttgaagaagctttgagagccaatgtgtcttccacgggtctcttttttgctacaagtaatcagccccatgtgttctcttaaactgagaattgcacctgggcaattcctgttttctaaggtggtctctgctgctatttaacaacccagagtaggcctctgtgaggcttcagtggcctcagaaaccagagggtccagatagggggcctgcttgggccctctgctgccaactgctcaaacctgctttagctccagccacttgtggcaaacaacctcgtttccttacaaattccagcatgtgactttggtgccgttacttgtgaaaaatctattctgttgtctttgatgtgtccaagaaaattcgtgtagtttacgtaaaaatatctgactcacaagaaagccaactgtatgtcttgtgatgggacagttcataatgtagttgctagaccactttacaaattgttcttgtcaccagatgtgttcagacattgctgtgcaattgttggggagggtagggggaaaggcgagaggagatacttattggtctttttgtttaataccttccccaagaggggacagtctggccaacttgctccagtaatgcaataaagacattgcaataaagtaaaaaaaaaaaaaaaaaaaa

SEQ ID NO: 8335 - DNA, 1632 bp, Homo sapiens
ccgttcctcaggaaaaggatggaccttctcttcttctcagatggtcccttccattcccctgaaacctgcatgagagctcctaacatgtttctccaatgcaatcaagccctagactccaaatgtcctcccagctcacctccatctatgcatctcatctctggatttggtgatcagactctatattgacagtaggatctcaaaccctgcatccatccttcctccagcaagccctgctagccacatgaggaacaagtttccgtgtcttctgccttcctcttggggaaaggtgccttgttgtgatgaattaactcactgttagggcagggtggagaatggtactccttccttctcctgtccactgtgggggaagcttggcaggtatattatatttcatcatttaggaggctggcatgaccaggacttatgggtgggaggggagcatttttagtgaagcaagaaaggagtttgccaagaagtgatctgttttaaaggtcatatttggagaaagggcaaggaattgggtctgctttatttttgggggtattttgtttttgttctcacctgctgcccccccaccccaccaccccagggataaattggatataaacactaaatactaatcagttgaacttaacatttaataaaaagaaagggtgaaataaactgaagaccattttagaactagtcagttctctgcagcaaagggaacaggagccatttgaaccctctgggacccctcaccccactgcttcagggtgctaggctgagggatgtttttcctcccccttaccgcccatgcccttgaaagaaaagtcactttttgtggagggcatcattcattcctgattcacaaaccccaaaaacctctggtgggagataggaagatagggcgtgggcctgggccttaacctcaatcttgtgtctgcctcagtcttttctgactggccctgaagttgtcagtggctctttctgtccttcagcccctggaaggtgctccaggataacaaagaagggcaggttgaagcccctcatggaaggagctggctttgtggggctgcaaaggacttttaagtcctgcctgtactgaagttcacagcccacctgactgagcagactcttcctgttcctttctctaccacccttgccttcccaggactgcacggtttaacacagcagagtacagaagggtgaagaagtgagcagaggcttatgaagatattcagatactcttctatgccaggaagcacaaagactttgttgagatttgcctcagttcagtagatcttccttggcagccagccataggttgtttctttgtcttccgggtcctaaagagcacagagaaaatggaggtccccagtctaggtaggaagctgattggatgaggacttctttttttccgacagcaggatggggctcttgggctccacacaccagatgctttggttttctacaactgttgctatgtgtagagggtgctcagagcgtggcatgagagcaaggagaccatggctactctttgaaatggatggggaaaattagcttaaaaatttaatcacgagattgcgccactgcactccagcctgggcgacagagccagactccgtctcaaaaaaaaaaaaaaaaaaaaaa

SEQ ID NO: 8336 - DNA, 2977 bp, Homo sapiens
ccgaatgtgaccgcctcccgctccctcacccgccgcggggaggaggagcgggcgagaagctgccgccgaacgacaggacgttggggcggcctggctccctcaggtttaagaattgtttaagctgcatcaatggagcacatacagggagcttggaagacgatcagcaatggttttggattcaaagatgccgtgtttgatggctccagctgcatctctcctacaatagttcagcagtttggctatcagcgccgggcatcagatgatggcaaactcacagatccttctaagacaagcaacactatccgtgttttcttgccgaacaagcaaagaacagtggtcaatgtgcgaaatggaatgagcttgcatgactgccttatgaaagcactcaaggtgaggggcctgcaaccagagtgctgtgcagtgttcagacttctccacgaacacaaaggtaaaaaagcacgcttagattggaatactgatgctgcgtctttgattggagaagaacttcaagtagatttcctggatcatgttcccctcacaacacacaactttgctcggaagacgttcctgaagcttgccttctgtgacatctgtcagaaattcctgctcaatggatttcgatgtcagacttgtggctacaaatttcatgagcactgtagcaccaaagtacctactatgtgtgtggactggagtaacatcagacaactcttattgtttccaaattccactattggtgatagtggagtcccagcactaccttctttgactatgcgtcgtatgcgagagtctgtttccaggatgcctgttagttctcagcacagatattctacacctcacgccttcacctttaacacctccagtccctcatctgaaggttccctctcccagaggcagaggtcgacatccacacctaatgtccacatggtcagcaccacgctgcctgtggacagcaggatgattgaggatgcaattcgaagtcacagcgaatcagcctcaccttcagccctgtccagtagccccaacaatctgagcccaacaggctggtcacagccgaaaacccccgtgccagcacaaagagagcgggcaccagtatctgggacccaggagaaaaacaaaattaggcctcgtggacagagagattcaagctattattgggaaatagaagccagtgaagtgatgctgtccactcggattgggtcaggctcttttggaactgtttataagggtaaatggcacggagatgttgcagtaaagatcctaaaggttgtcgacccaaccccagagcaattccaggccttcaggaatgaggtggctgttctgcgcaaaacacggcatgtgaacattctgcttttcatggggtacatgacaaaggacaacctggcaattgtgacccagtggtgcgagggcagcagcctctacaaacacctgcatgtccaggagaccaagtttcagatgttccagctaattgacattgcccggcagacggctcagggaatggactatttgcatgcaaagaacatcatccatagagacatgaaatccaacaatatatttctccatgaaggcttaacagtgaaaattggagattttggtttggcaacagtaaagtcacgctggagtggttctcagcaggttgaacaacctactggctctgtcctctggatggccccagaggtgatccgaatgcaggataacaacccattcagtttccagtcggatgtctactcctatggcatcgtattgtatgaactgatgacgggggagcttccttattctcacatcaacaaccgagatcagatcatcttcatggtgggccgaggatatgcctccccagatcttagtaagctatataagaactgccccaaagcaatgaagaggctggtagctgactgtgtgaagaaagtaaaggaagagaggcctctttttccccagatcctgtcttccattgagctgctccaacactctctaccgaagatcaaccggagcgcttccgagccatccttgcatcgggcagcccacactgaggatatcaatgcttgcacgctgaccacgtccccgaggctgcctgtcttctagttgactttgcacctgtcttcaggctgccaggggaggaggagaagccagcaggcaccacttttctgctccctttctccagaggcagaacacatgttttcagagaagctctgctaaggaccttctagactgctcacagggccttaacttcatgttgccttcttttctatccctttgggccctgggagaaggaagccatttgcagtgctggtgtgtcctgctccctccccacattccccatgctcaaggcccagccttctgtagatgcgcaagtggatgttgatggtagtacaaaaagcaggggcccagccccagctgttggctacatgagtatttagaggaagtaaggtagcaggcagtccagccctgatgtggagacacatgggattttggaaatcagcttctggaggaatgcatgtcacaggcgggactttcttcagagagtggtgcagcgccagacattttgcacataaggcaccaaacagcccaggactgccgagactctggccgcccgaaggagcctgctttggtactatggaacttttcttaggggacacgtcctcctttcacagcttctaaggtgtccagtgcattgggatggttttccaggcaaggcactcggccaatccgcatctcagccctctcaggagcagtcttccatcatgctgaattttgtcttccaggagctgcccctatggggcgggccgcagggccagcctgtttctctaacaaacaaacaaacaaacagccttgtttctctagtcacatcatgtgtatacaaggaagccaggaatacaggttttcttgatgatttgggttttaattttgtttttattgcacctgacaaaatacagttatctgatggtccctcaattatgttattttaataaaataaattaaattt

SEQ ID NO: 8337 - DNA, 5629 bp, Homo sapiens
gcgcgaccgtcccgggggtggggccgggcgcagcggcgagaggaggcgaaggtggctgcggtagcagcagcgcggcagcctcggacccagcccggagcgcagggcggccgctgcaggtccccgctcccctccccgtgcgtccgcccatggccgccgccgggcagctgtgcttgctctacctgtcggcggggctcctgtcccggctcggcgcagccttcaacttggacactcgggaggacaacgtgatccggaaatatggagaccccgggagcctcttcggcttctcgctggccatgcactggcaactgcagcccgaggacaagcggctgttgctcgtgggggccccgcgcggagaagcgcttccactgcagagagccaacagaacgggagggctgtacagctgcgacatcaccgcccgggggccatgcacgcggatcgagtttgataacgatgctgaccccacgtcagaaagcaaggaagatcagtggatgggggtcaccgtccagagccaaggtccagggggcaaggtcgtgacatgtgctcaccgatatgaaaaaaggcagcatgttaatacgaagcaggaatcccgagacatctttgggcggtgttatgtcctgagtcagaatctcaggattgaagacgatatggatgggggagattggagcttttgtgatgggcgattgagaggccatgagaaatttggctcttgccagcaaggtgtagcagctacttttactaaagactttcattacattgtatttggagccccgggtacttataactggaaagggattgttcgtgtagagcaaaagaataacactttttttgacatgaacatctttgaagatgggccttatgaagttggtggagagactgagcatgatgaaagtctcgttcctgttcctgctaacagttacttaggtttttctttggactcagggaaaggtattgtttctaaagatgagatcacttttgtatctggtgctcccagagccaatcacagtggagccgtggttttgctgaagagagacatgaagtctgcacatctcctccctgagcacatattcgatggagaaggtctggcctcttcatttggctatgatgtggcggtggtggacctcaacaaggatgggtggcaagatatagttattggagccccacagtattttgatagagatggagaagttggaggtgcagtgtatgtctacatgaaccagcaaggcagatggaataatgtgaagccaattcgtcttaatggaaccaaagattctatgtttggcattgcagtaaaaaatattggagatattaatcaagatggctacccagatattgcagttggagctccgtatgatgacttgggaaaggtttttatctatcatggatctgcaaatggaataaataccaaaccaacacaggttctcaagggtatatcaccttattttggatattcaattgctggaaacatggaccttgatcgaaattcctaccctgatgttgctgttggttccctctcagattcagtaactattttcagatcccggcctgtgattaatattcagaaaaccatcacagtaactcctaacagaattgacctccgccagaaaacagcgtgtggggcgcctagtgggatatgcctccaggttaaatcctgttttgaatatactgctaaccccgctggttataatccttcaatatcaattgtgggcacacttgaagctgaaaaagaaagaagaaaatctgggctatcctcaagagttcagtttcgaaaccaaggttctgagcccaaatatactcaagaactaactctgaagaggcagaaacagaaagtgtgcatggaggaaaccctgtggctacaggataatatcagagataaactgcgtcccattcccataactgcctcagtggagatccaagagccaagctctcgtaggcgagtgaattcacttccagaagttcttccaattctgaattcagatgaacccaagacagctcatattgatgttcacttcttaaaagagggatgtggagacgacaatgtatgtaacagcaaccttaaactagaatataaattttgcacccgagaaggaaatcaagacaaattttcttatttaccaattcaaaaaggtgtaccagaactagttctaaaagatcagaaggatattgctttagaaataacagtgacaaacagcccttccaacccaaggaatcccacaaaagatggcgatgacgcccatgaggctaaactgattgcaacgtttccagacactttaacctattctgcatatagagaactgagggctttccctgagaaacagttgagttgtgttgccaaccagaatggctcgcaagctgactgtgagctcggaaatccttttaaaagaaattcaaatgtcactttttatttggttttaagtacaactgaagtcacctttgacaccccatatctggatattaatctgaagttagaaacaacaagcaatcaagataatttggctccaattacagctaaagcaaaagtggttattgaactgcttttatcggtctcgggagttgctaaaccttcccaggtgtattttggaggtacagttgttggcgagcaagctatgaaatctgaagatgaagtgggaagtttaatagagtatgaattcagggtaataaacttaggtaaacctcttacaaacctcggcacagcaaccttgaacattcagtggccaaaagaaattagcaatgggaaatggttgctttatttggtgaaagtagaatccaaaggattggaaaaggtaacttgtgagccacaaaaggagataaactccctgaacctaacggagtctcacaactcaagaaagaaacgggaaattactgaaaaacagatagatgataacagaaaattttctttatttgctgaaagaaaataccagactcttaactgtagcgtgaacgtgaactgtgtgaacatcagatgcccgctgcgggggctggacagcaaggcgtctcttattttgcgctcgaggttatggaacagcacatttctagaggaatattccaaactgaactacttggacattctcatgcgagccttcattgatgtgactgctgctgccgaaaatatcaggctgccaaatgcaggcactcaggttcgagtgactgtgtttccctcaaagactgtagctcagtattcgggagtaccttggtggatcatcctagtggctattctcgctgggatcttgatgcttgctttattagtgtttatactatggaagtgtggtttcttcaagagaaataagaaagatcattatgatgccacatatcacaaggctgagatccatgctcagccatctgataaagagaggcttacttctgatgcatagtattgatctacttctgtaattgtgtggattctttaaacgctctaggtacgatgacagtgttccccgataccatgctgtaaggatccggaaagaagagcgagagatcaaagatgaaaagtatattgataaccttgaaaaaaaacagtggatcacaaagtggaacagaaatgaaagctactcatagcgggggcctaaaaaaaaaaaagcttcacagtacccaaactgctttttccaactcagaaattcaatttggatttaaaagcctgctcaatccctgaggactgatttcagagtgactacacacagtacgaacctacagttttaactgtggatattgttacgtagcctaaggctcctgttttgcacagccaaatttaaaactgttggaatggatttttctttaactgccgtaatttaactttctgggttgcctttgtttttggcgtggctgacttacatcatgtgttggggaagggcctgcccagttgcactcaggtgacatcctccagatagtgtagctgaggaggcacctacactcacctgcactaacagagtggccgtcctaacctcgggcctgctgcgcagacgtccatcacgttagctgtcccacatcacaagactatgccattggggtagttgtgtttcaacggaaagtgctgtcttaaactaaatgtgcaatagaaggtgatgttgccatcctaccgtcttttcctgtttcctagctgtgtgaatacctgctcacgtcaaatgcatacaagtttcattctccctttcactaaaaacacacaggtgcaacagacttgaatgctagttatacttatttgtatatggtatttattttttcttttctttacaaaccattttgttattgactaacaggccaaagagtctccagtttacccttcaggttggtttaatcaatcagaattagaattagagcatgggagggtcatcactatgacctaaattatttactgcaaaaagaaaatctttataaatgtaccagagagagttgttttaataacttatctataaactataacctctccttcatgacagcctccaccccacaacccaaaaggtttaagaaatagaattataactgtaaagatgtttatttcaggcattggatattttttactttagaagcctgcataatgtttctggatttacatactgtaacattcaggaattcttggagaagatgggtttattcactgaactctagtgcggtttactcactgctgcaaatactgtatattcaggacttgaaagaaatggtgaatgcctatggaactagtggatccaaactgatccagtataagactactgaatctgctaccaaaacagttaatcagtgagtcgagtgttctattttttgttttgtttcctcccctatctgtattcccaaaaattactttggggctaatttaacaagaactttaaattgtgttttaattgtaaaaatggcagggggtggaattattactctatacattcaacagagactgaatagatatgaaagctgattttttttaattaccatgcttcacaatgttaagttatatggggagcaacagcaaacaggtgctaatttgttttggatatagtataagcagtgtctgtgttttgaaagaatagaacacagtttgtagtgccactgttgttttggggggggctttttttctttttccggaaaatccttaaaccttaagatactaaggacgttgttttggttgtacttggaattcttagtcacaaaatatattttgtttacaaaaatttctgtaaaacaggttataacagtgtttaaagtctcagtttcttgcttggggaacttgtgtccctaatgtgttagattgctagattgctaaggagctgatacttgacagttttttagacctgtgttactaaaaaaaagatgaatgtcggaaaagggtgttgggagggtggtcaacaaagaaacaaagatgttatggtgtttagacttatggttgttaaaaatgtcatctcaagtcaagtcactggtctgtttgcatttgatacatttttgtactaactagcattgtaaaattatttcatgattagaaattacctgtggatatttgtataaaagtgtgaaataaattttttataaaagtgttcattgtttcgtaacacagcattgtatatgtgaagcaaactctaaaattataaatgacaacctgaattatctatttcatcaaaaaaaaaaaaaaaaaaaactttatgggcacaactgg

SEQ ID NO: 8338 - DNA, 1380 bp, Homo sapiens
cagcagcatgcgggggttgctggtgttgagtgtcctgttgggggctgtctttggcaaggaggactttgtggggcatcaggtgctccgaatctctgtagccgatgaggcccaggtacagaaggtgaaggagctggaggacctggagcacctgcagctggacttctggcgggggcctgcccaccctggctcccccatcgacgtccgagtgcccttccccagcatccaggcggtcaagatctttctggagtcccacggcatcagctatgagaccatgatcgaggacgtgcagtcgctgctggacgaggagcaggagcagatgttcgccttccggtcccgggcgcgctccaccgacacttttaactacgccacctaccacaccctggaggagatctatgacttcctggacctgctggtggcggagaacccgcaccttgtcagcaagatccagattggcaacacctatgaagggcgtcccatttatgtgctgaagttcagcacggggggcagtaagcgtccagccatctggatcgacacgggcatccattcccgggagtgggtcacccaggccagtggggtctggtttgcaaagaagatcactcaagactatgggcaggatgcagctttcaccgccattctcgacaccttggacatcttcctggagatcgtcaccaaccctgatggctttgccttcacgcacagcacgaatcgcatgtggcgcaagactcggtcccacacagcaggctccctctgtattggcgtggaccccaacaggaactgggacgctggctttgggttgtccggagccagcagtaacccctgctcggagacttaccacggcaagtttgccaattccgaagtggaggtcaagtccattgtagactttgtgaaggaccatgggaacatcaaggccttcatctccatccacagctactcccagctcctcatgtatccctatggctacaaaacagaaccagtccctgaccaggatgagctggatcagctttccaaggctgctgtgacagccctggcctctctctacgggaccaagttcaactatggcagcatcatcaaggcaatttatcaagccagtggaagcactattgactggacctacagccagggcatcaagtactccttcaccttcgagctccgggacactgggcgctatggcttcctgctgccagcctcccagatcatccccacagccaaggagacgtggctggcgcttctgaccatcatggagcacaccctgaatcacccctactgagctgaccctttgacacccttcttgtcctcctctctggccccatccaggcaaccaaataaagtttgagtgtaccaggaacagaatcctggggcttgcaaaaaaaaaaaaaaaaa

SEQ ID NO: 8339 - DNA, 1184 bp, Homo sapiens
atctgccacgatgttgctgctcagcctgaccctaagcctggttctcctcggctcctcctggggctgcggcattcctgccatcaaaccggcactgagcttcagccagaggattgtcaacggggagaatgcagtgttgggctcctggccctggcaggtgtccctgcaggacagcagcggcttccacttctgcggtggttctctcatcagccagtcctgggtggtcactgctgcccactgcaatgtcagccctggccgccattttgttgtcctgggcgagtatgaccgatcatcaaacgcagagcccttgcaggttctgtccgtctctcgggccattacacaccctagctggaactctaccaccatgaacaatgacgtgacgctgctgaagctcgcctcgccagcccagtacacaacacgcatctcgccagtttgcctggcatcctcaaacgaggctctgactgaaggcctcacgtgtgtcaccaccggctggggtcgcctcagtggcgtgggcaatgtgacaccagcacatctgcagcaggtggctttgcccctggtcactgtgaatcagtgccggcagtactggggctcaagtatcactgactccatgatctgtgcaggtggcgcaggtgcctcctcgtgccagggtgactccggaggccctcttgtctgccagaagggaaacacatgggtgcttattggtattgtctcctggggcaccaaaaactgcaatgtgcgcgcacctgctgtgtatactcgagttagcaagttcagcacctggatcaaccaggtcatagcctacaactgagctcaccacaggccctccccagctcaacccattaaagacccaggccctgtcccatcatgcattcatgtctgtcttcctggctcaggagaaagaagaggctgttgagggtccgactccctacttggacttctggcacagaaggggctgagtgactccttgagtagcagtggctcttcctagagtagccatgccgaggccggggcccccacccctcctccagggcaaccccttggtcctacagcaagaagccagaactgttggaatgaatggcagccctccctggagaggcagcctgtttactgaatacagaggatacgtttacaaactgaatacgcataataaataactgcacattctccatccaaaaaaaaaaaaaaaa

SEQ ID NO: 8340 - DNA, 2437 bp, Homo sapiens
ctgcaatggcggctctagactccctgtcgctcttcactagcctcggcctgagcgagcagaaggcccgcgagacgctcaagaactcggctctgagcgcgcagctgcgcgaggccgctactcaggctcagcagaccctgggttccaccattgacaaagctaccgggatcctgttatatggcttggcctcccgactcagggatacccggcgtctctccttccttgtaagctacatagccagtaagaagatccacactgagccccagctaagcgctgcccttgagtatgtgcggagtcaccccttggaccccatcgacactgtggacttcgagcgggaatgtggcgtgggtgtcattgtgaccccagagcagattgaggaggctgtggaggctgctattaacaggcaccggccccagctcctggtggaacgttaccatttcaacatggggctgctgatgggagaggctcgggctgtgctgaagtgggcagatggcaaaatgatcaagaatgaagtggacatgcaggtcctccaccttctgggccccaagttggaggctgatctggagaagaagttcaaggtggcaaaagctcggctagaagaaacagaccggaggacggcaaaggatgtggtggagaatggcgagactgctgaccagaccctgtctctgatggagcagctccggggggaggcccttaagttccacaagcctggtgagaactacaagaccccaggctatgtggtcactccacacaccatgaatctactaaagcagcacctggagattactggtgggcaggtacgtacccggttcccgccagaacccaatggaatcctgcatattggacatgccaaagccatcaatttcaactttggctatgccaaggccaacaatggcatctgttttctgcgttttgatgacaccaaccctgagaaggaggaagcaaagttcttcacggccatctgtgacatggtagcctggctaggctacacaccttacaaagtcacatatgcgtctgactattttgaccagctatatgcgtgggctgtggagctcatccgcaggggtctggcttatgtgtgccaccagcgaggagaggagctcaaaggccataatactctgccttcaccctggagagaccgtcccatggaggagtcactgctgctctttgaggcaatgcgcaagggcaagttttcagagggcgaggccacactacggatgaagctggtgatggaggatggcaagatggaccctgtagcctatcgagtcaagtatacaccacaccaccgcacaggggacaaatggtgcatctatcccacctacgactacacacactgcctctgtgactccatcgagcacatcactcactcactctgcaccaaggaattccaggcccgacgctcttcctacttctggctttgcaatgcactggacgtctattgccctgtgcagtgggagtatggccgcctcaacctgcactatgctgttgtctctaagaggaagatcctccagcttgtagcaactggtgctgtgcgggactgggatgacccacggctctttacactcacggccctgcgacggcggggcttcccacctgaggccatcaacaacttctgtgcccgggtgggagtgactgtggcacaaaccacaatggagccacatcttctagaagcctgtgtgcgtgatgtgctgaatgacacagccccacgagccatggctgtgctggagtcactacgggtcatcatcaccaactttcctgctgccaagtccttggacatccaggtgcccaacttcccagctgatgagaccaaaggcttccatcaggttccctttgcacccattgtcttcattgagaggactgacttcaaggaggagccagagccaggatttaagcgcctggcttggggccagcctgtgggcctgaggcatacaggctacgtcattgagctgcagcatgttgtcaagggccccagtggttgtgtagagagtctggaggtgacctgcagacgggcagatgctggagagaagccaaaggcctttattcactgggtgtcacagcctttgatgtgtgaggttcgcctctatgagcgactattccagcacaagaaccctgaagatcctactgaggtgcctggtggatttttaagtgacctgaacctggcatcactacacgtggtggatgcagcattagtggactgctctgtggccctggcaaaacccttcgacaagttccagtttgagcgtcttggatatttctccgtggatccagacagccatcagggaaagcttgtctttaaccgaactgtcacactgaaggaagacccaggaaaggtgtgagctggaagcactgaacctacctcatcctcctggagggtgtggctaccctcgccaccccaaattccatgtcaataaagaacagctaaattctcctagaaaaaaaa

SEQ ID NO: 8341 - DNA, 1830 bp, Homo sapiens
tccgggtcagctgactcccgactctgtggagtctagctgccagggtcgcggcagctgcggggagagatgactggggagcgacccagcacggcgctcccggacagacgctgggggccgcggattctgggcttctggggaggctgtagggtttgggtgtttgccgcgatcttcctgctgctgtctctggcagcctcctggtccaaggctgagaacgacttcggtctggtgcagccgctggtgaccatggagcaactgctgtgggtgagcgggagacagatcggctcagtggacaccttccgcatcccgctcatcacagccactccgcggggcactcttctcgcctttgctgaggcgaggaaaatgtcctcatccgatgagggggccaagttcatcgccctgcggaggtccatggaccagggcagcacatggtctcctacagcgttcattgtcaatgatggggatgtccccgatgggctgaaccttggggcagtagtgagcgatgttgagacaggagtagtatttcttttctactccctttgtgctcacaaggccggctgccaggtggcctctaccatgttggtatggagcaaggatgatggtgtttcctggagcacaccccggaatctctccctggatattggcactgaagtgtttgcccctggaccgggctctggtattcagaaacagcgggagccacggaagggccgcctcatcgtgtgtggccatgggacgctggagcgggacggagtcttctgtctcctcagcgatgatcatggtgcctcctggcgctacggaagtggggtcagcggcatcccctacggtcagcccaagcaggaaaatgatttcaatcctgatgaatgccagccctatgagctcccagatggctcagtcgtcatcaatgcccgaaaccagaacaactaccactgccactgccgaattgtcctccgcagctatgatgcctgtgatacactaaggccccgtgatgtgaccttcgaccctgagctcgtggaccctgtggtagctgcaggagctgtagtcaccagctccggcattgtcttcttctccaacccagcacatccagagttccgagtgaacctgaccctgcgatggagcttcagcaatggtacctcatggcggaaagagacagtccagctatggccaggccccagtggctattcatccctggcaaccctggagggcagcatggatggagaggagcaggccccccagctctacgtcctgtatgagaaaggccggaaccactacacagagagcatctccgtggccaaaatcagtgtctatgggacactctgagctgtgccactgccacaggggtattctgccttcaggactctgccttcaggaacacgggtctgtagagggtctgctggagacgcctgaaagacagttccatcttcctttagactccagccttggcaaaatcaccttccctttaccagggaaatcacttcctttaggactgaaagctaggcgtcctctcccacaaaaaagtcctgccctcatctgagaatactgtctttccatatggctaagtgtggccccaccaccctctctgccctcccgggacattgattggtcctgtcttgggcaggtctagtgagctgtagaattgaatcaatgtgaactcagggaactggggaaggctgagcctcctctttggtgttgcggtaagataaccgacagggctggtgaaagtccccagatggcaggatatttggtttcagagtaaggactaggtgcaccaccatgactgactatcaatcaaaatgtttgtaacttaaaatttttaatgaaggataatgaatattt

SEQ ID NO: 8342 - DNA, 1504 bp, Homo sapiens
gggcctgcacgttgactgtgggaaactcggaaacaagctcacatcttcctgtgggaaaccttctagcaacaggatgactctgcagtggactgcagttgccaccttcctctatgcggaggtctttgttgtgttgcttctctgcattcccttcatttctcctaaaagatggcagaagattttcaagtcccggctggtggagttgttagtgtcctatggcaacaccttctttgtggttctcattgtcatccttgtgctgttggtcatcgatgccgtgcgcgaaattcggaagtatgatgatgtgacggaaaaggtgaacctccagaacaatcccggggccatggagcacttccacatgaagcttttccgtgcccagaggaatctctacattgctggcttttccttgctgctgtccttcctgcttagacgcctggtgactctcatttcgcagcaggccacgctgctggcctccaatgaagcctttaaaaagcaggcggagagtgctagtgaggcagccaagaagtacatggaggagaatgaccagctcaagaagggagctgctgttgacggaggcaagttggatgtcgggaatgctgaggtgaagttggaggaagagaacaggagcctgaaggctgacctgcagaagctaaaggacgagctggccagcactaagcaaaaactagagaaagctgaaaacgaggttctggccatgcggaagcagtctgagggcctcaccaaggagtacgaccgcttgctggaggagcacgcaaagctgcaggctgcagtagatggtcccatggacaagaaggaagagtaagggcctccttcctcccctgcctgcagctggcttccacctggcacgtgcctgctgcttcctgagagcccggcctctccctccagtacttctgtttgtgcccttctgcttcccccattcccttccacagctcatagctcgtcatctcggcccttgtccacactctccaagcacattacaggggacctgattgctacacgttcagaatgcgtttgctgtcatcctgcttgcctgccaggcctgcacagccttggcttcacgcctgagcgtggagagcacgagttagttgtagtccggcttgcggtggggctgacttcctgttggtttgagcccctttttgttttgccctctgggtgttttctttggtcccgcaggagggtgggtggagcaggtggactggagtttctcttgagggcaataaaagttgtatgatgtttgtatgtgttttgtatttctctggagtgcaatggtgcaatctcagctcactgcaacctctgcctcccaggttcaaaccattctcttgcctcagcctcctgagcagctgggattacaggcgctggccacacacccagctgattgttgtatttttagtagagctgggtttcaccatgttggccaggctggtctcgaactcctgacctcaggcaatccacccacctcagcctcccaacatgctgcaattacagatgtgag

SEQ ID NO: 8343 - DNA, 2370 bp, Homo sapiens
cacgagggagcgctaacgtctttctgtctccccgcggtggtgatgacggtgaaaactgaggctgctaagggcaccctcacttactccaggatgaggggcatggtggcaattctcatcgctttcatgaagcagaggaggatgggtctgaacgactttattcagaagattgccaataactcctatgcatgcaaacaccctgaagttcagtccatcttgaagatctcccaacctcaggagcctgagcttatgaatgccaacccttctcctccaccaagtccttctcagcaaatcaaccttggcccgtcgtccaatcctcatgctaaaccatctgactttcacttcttgaaagtgatcggaaagggcagttttggaaaggttcttctagcaagacacaaggcagaagaagtgttctatgcagtcaaagttttacagaagaaagcaatcctgaaaaagaaagaggagaagcatattatgtcggagcggaatgttctgttgaagaatgtgaagcaccctttcctggtgggccttcacttctctttccagactgctgacaaattgtactttgtcctagactacattaatggtggagagttgttctaccatctccagagggaacgctgcttcctggaaccacgggctcgtttctatgctgctgaaatagccagtgccttgggctacctgcattcactgaacatcgtttatagagacttaaaaccagagaatattttgctagattcacagggacacattgtccttactgatttcggactctgcaaggagaacattgaacacaacagcacaacatccaccttctgtggcacgccggagtatctcgcacctgaggtgcttcataagcagccttatgacaggactgtggactggtggtgcctgggagctgtcttgtatgagatgctgtatggcctgccgcctttttatagccgaaacacagctgaaatgtacgacaacattctgaacaagcctctccagctgaaaccaaatattacaaattccgcaagacacctcctggagggcctcctgcagaaggacaggacaaagcggctcggggccaaggatgacttcatggagattaagagtcatgtcttcttctccttaattaactgggatgatctcattaataagaagattactcccccttttaacccaaatgtgagtgggcccaacgagctacggcactttgaccccgagtttaccgaagagcctgtccccaactccattggcaagtcccctgacagcgtcctcgtcacagccagcgtcaaggaagctgccgaggctttcctaggcttttcctatgcgcctcccacggactctttcctctgaaccctgttagggcttggttttaaaggattttatgtgtgtttccgaatgttttagttagccttttggtggagccgccagctgacaggacatcttacaagagaatttgcacatctctggaagcttagcaatcttattgcacactgttcgctggaattttttgaagagcacattctcctcagtgagctcatgaggttttcatttttattcttccttccaacgtggtgctatctctgaaacgagcgttagagtgccgccttagacggaggcaggagtttcgttagaaagcggacctgttctaaaaaaggtctcctgcagatctgtctgggctgtgatgacgaatattatgaaatgtgccttttctgaagagattgtgttagctccaaagcttttcctatcgcagtgtttcagttctttattttcccttgtggatatgctgtgtgaaccgtcgtgtgagtgtggtatgcctgatcacagatggattttgttataagcatcaatgtgacacttgcaggacactacaacgtgggacattgtttgtttcttccatatttggaagataaatttatgtgtagacttttttgtaagatacggttaataactaaaatttattgaaatggtcttgcaatgactcgtattcagatgcctaaagaaagcattgctgctacaaatatttctatttttagaaagggtttttatggaccaatgccccagttgtcagtcagagccgttggtgtttttcattgtttaaaatgtcacctgtaaaatgggcattatttatgtttttttttttgcattcctgataattgtatgtattgtataaagaacgtctgtacattgggttataacactagtatatttaaacttacaggcttatttgtaatgtaaaccaccattttaatgtactgtaattaacatggttataatacgtacaatccttccctcatcccatcacacaactttttttgtgtgtgataaactgattttggtttgcaataaaaccttgaaaaataaaaaaaaaaaaaaaaaaaaaaa

SEQ ID NO: 8344 - DNA, 991 bp, Homo sapiens
gggatcagtcttcccgcgtccgccgattcctcctccttggtcgccgcgtccttggctggcgtcagaaaaatggctacaaacttcctagcacatgagaagatctggttcgacaagttcaaatatgacgacgcagaaaggagattctacgagcagatgaacgggcctgtgcgaggtgcctcccgccaggagaacggcgccacggtgatcctccgtgacattgcgagagccagagagaacatccagaaatccctggctggaagctcaggccccggggcctccagcggcaccagcggagaccacggtgagctcgtcgtccggattgccagtctggaagtggagaaccagagtctgcgtggcgtggtacaggagctgcagcaggccatctccaagctggaggcccggctgaacgtgctggagaagagctcgcctggccaccgggccacggccccacagacccagcacgtatctcccatgcgccaagtggagcccccagccaagaagccagccacaccagcagaggatgacgaggatgatgacattgacctgtttggcagtgacaatgaggaggaggacaaggaggcggcacagctgcgggaggagcggctacggcagtacgcggagaagaaggccaagaagcctgcactggtggccaagtcctccatcctgctggatgtcaagccttgggatgatgagacggacatggcccagctggaggcctgtgtgcgctctatccagctggacgggctggtctggggggcttccaagctggtgcccgtgggctacggtatccggaagctacagattcagtgtgtggtggaggacgacaaggtggggacagacttgctggaggaggagatcaccaagtttgaggagcacgtgcagagtgtcgatatcgcagctttcaacaagatctgaagcctgagtgtgtgtacgtgcgcgcgtgcgtgagggccctgccacgattaaagactgagaccggcaaaaaaaaaaa

SEQ ID NO: 8345 - DNA, 6381 bp, Homo sapiens
aaaaataactcatattgtctctgaggttcttttccagtgaagtgtttagtattgccgctatttggagtacaaagttggagcttttaaagaacctgggagttcaaaagtataaggagaaataaatgaaaagcagaagtattttgaggcaataagtatagactcaaatctatattatgacccacttgtagcaccacttggaattctaccaataagagatttatttgggcaaactataatggttgttggaaattgcaaatcttagtgtgaattattttagtccagttggtttctttctttctcttacctgaaatgaactatactgaggcaataggagctttgtatagtaatttaggagtgtaaaacaacttagggaaaaggattattaagcaggatgattgggatgacatcatgtgaaatttaggaattggaggcattgggaattgagagggtgctaacaaaggaaaacagcttattttagaatttgtctggaggatgtagaattgaagaagttttggtatttcttctgcagcggccccagtgcccttgaccaggaacatctcttggagtcagtagttttcatgaggctgacctaggaacttggccaacatatgcaacattgttctatttaaaatattccttgaattaaattcgatagtatcaatttaaaacataaagttttcactcaactcctttagaagttagattttagcttgtacttgtctttacctcttctgctgattatcagttgacaacactgagattactttcattttcctgtaagtcattatgaatttttctggtcaaccatgagttatccagtggaagccaataagtaggaagtactgtaaaagaattacaataaaataagagaaaccacttggagagcaagagggcttgtggacttgggggagcggttgtgagaaatgtctcagaacttaatttacaaataacattggtagattgacatgttgtctttcctataaagtaactttacctctgtcttaatagtaaactactatgaaagtgaattcgtgttcctcttgatttgtgaactgatgaaaattacaaaatgtggagttttttccccagataaagtaaatggtggaatattcaggtttatttgatacctagaaaatacctgaaattttccgtggtaataggcacattttgaaactgttttttttttctctgacaattgaatatattttatatatagttgattttgattattgaagactaaggaaaatcttaagtttgaatgttagaaaatgaattttgcaaatttgaagtaattttattctttatgttttgggattgtagttatgttagatattcctcagttggggtaattgtcttgcatcattatctcttatcataatctgtttttcttcacacagtgttatagttttgccgctggactcttccctcccttcccccaccccatcaggatgatatgagacttgaaagaagacgatgcatacaggaggagagacttcagcatgcaaaccttcatctgttcggcttgcaccgtcattttcattccatgctgctggccttcagatggctggacagatgccccattcacatcagtacagtgaccgtcgccagccaaacataagtgaccaacaggtttctgccttatcatattctgaccagattcagcaacctctaactaaccagaggcggatgccccaaaccttccgtgacccagcaactgctcccctgagaaaactttctgttgacttgatcaaaacatacaagcatattaatgaggtttactatgcaaaaaagaagcgaagacaccaacagggccagggagacgattctagtcataagaaggaacggaaggtttacaatgatggttatgatgatgataactatgattatattgtaaaaaacggagaaaagtggatggatcgttacgaaattgactccttgataggcaaaggttcctttggacaggttgtaaaggcatatgatcgtgtggagcaagaatgggttgccattaaaataataaagaacaagaaggcttttctgaatcaagcacagatagaagtgcgacttcttgagctcatgaacaaacatgacactgaaatgaaatactacatagtgcatttgaaacgccactttatgtttcgaaaccatctctgtttagtttttgaaatgctgtcctacaacctctatgacttgctgagaaacaccaatttccgaggggtctctttgaacctaacacgaaagtttgcgcaacagatgtgcactgcactgcttttccttgcgactccagaacttagtatcattcactgtgatctaaaacctgaaaatatccttctttgtaaccccaaacgcagtgcaatcaagatagttgactttggcagttcttgtcagttggggcagaggatataccagtatattcagagtcgcttttatcggtctccagaggtgctactgggaatgccttatgaccttgccattgatatgtggtccctcgggtgtattttggttgaaatgcacactggagaacctctgttcagtggtgccaatgaggtagatcagatgaataaaatagtggaagttctgggtattccacctgctcatattcttgaccaagcaccaaaagcaagaaagttctttgagaagttgccagatggcacttggaacttaaagaagaccaaagatggaaaacgggagtacaaaccaccaggaacccgtaaacttcataacattcttggagtggaaacaggaggacctggtgggcgacgtgctggggagtcaggtcatacggtcgctgactacttgaagttcaaagacctcattttaaggatgcttgattatgaccccaaaactcgaattcaaccttattatgctctgcagcacagtttcttcaagaaaacagctgatgaaggtacaaatacaagtaatagtgtatctacaagccccgccatggagcagtctcagtcttcgggcaccacctccagtacatcgtcaagctcaggtggctcatcggggacaagcaacagtgggagagcccggtcggatccgacgcaccagcatcggcacagtggtgggcacttcacagctgccgtgcaggccatggactgcgagacacacagtccccaggtgcgtcagcaatttcctgctcctcttggttggtcaggcactgaagctcctacacaggtcactgttgaaactcatcctgttcaagaaacaacctttcatgtagcccctcaacagaatgcattgcatcatcaccatggtaacagttcccatcaccatcaccaccaccaccaccatcaccaccaccatggacaacaagccttgggtaaccggaccaggccaagggtctacaattctccaacgaatagctcctctacccaagattctatggaggttggccacagtcaccactccatgacatccctgtcttcctcaacgacttcttcctcgacatcttcctcctctactggtaaccaaggcaatcaggcctaccagaatcgcccagtggctgctaataccttggactttggacagaatggagctatggacgttaatttgaccgtctactccaatccccgccaagagactggcatagctggacatccaacataccaattttctgctaatacaggtcctgcacattacatgactgaaggacatctgacaatgaggcaaggggctgatagagaagagtcccccatgacaggagtttgtgtgcaacagagtcctgtagctagctcgtgactacattgaaacttgagtttgtttcttgtgtgtttttatagaagtggtgttttttttccaaaaacaaagtgcaaagctgcttgaatcaggaggagattaacacactgaaccgctacaagagggcaaagctgatttttttttttaacttgaaaagattgcaaagggacattgaagtgtttaaaagagccatgtccaaacccatcttcatggatagctcagaggtatcctctttttgctcccccattttaacttgccacatcccagtcacagtggggtttttttgtctttctattcagcaaaagttaatattcagatgttggtcttggtcatttgccaactaattttaaagtaaaaggcactgcacataatttgcataaagggccccatgagggtgtttttttttttctttttgtcccccccatccccctttttttttgttttgttctgttttgttttgggtgggagggtgggaaatttgggtttttaagtcctctaaacacacttgggcacggaaatgcagtactgtaaggaagagggacctccagcttccacaaacaccatcttcagctgtatgaaagggacggttgtggtgaagtttgtcaggcacagtaagcatgctgagtggcggggatcagaactctcctatctgaacctactgaggagcaaagcagcaattacatgggatcctgtggctctcccgttgcagaggccacaggaagataggatggaacgtgactggtctcctaaccaaggtgcactgagaagcaatcaacgggtcggtcgtggccagtcctggggaggtctgagtggtggtctttgggataacctttggccttatggatttggactcgaaattagaagagcctaccatttcagatgcaatcacttttggacatgcttttgcagacagtccttaatgctgaaaacacagagaatgggtaattcaagaggcctttcttttaaaatagacttttgtgacccactaattgtaaggtattgcaaggtcactttgcgtgtgtcataaagttgacttccttattggttgaaggtcacagaagtagtggtttgctttgatggaaatagctacagctgtgtcccttcctgctttttactttttcttttgctttttctcggcacgtggtatctccaccatttcttctgcacaaagatgtcttctgttcatcctgaacatttttaaaaaatgcagaattttatgtgactgcttttttgcctcacaattatgctgtgaattttacaaaaatttattttcttttttgataatttattgtaccaaagctgtttttatagcacatagatgtctgtaaccaataatgtagcagttctgcactttgacacaaggtgtaactagaccatttttaaatgtcagttgaaaattatggctgtactattgcttaaacaaaactggaactgttgttgaatccatagccaatacatttacagcaatctgtgtactgaacatagtagattgacatctaattcaagattacaacatctgttacattctaagtgtgttcaggcttctgaaggtaaagggacactggatccagaagctatggaaccagcagttgattcttgtattcctgattaacctacttgtaaacttgaaagcaagaccttgattgcaccaacaggtccagagtatgagtgcaagcaaagcagaactctcatgcgtgacctgagcagacaggctggtatttaacaggtgcctcgtgttgagattacgctgccttaatgtaacacagtctggcagttgctaaatttgtgttcccattttaaattgaccaattttggggtgtgacacttttgagcggttgaattgggagaatgaagataagtaatttacctgtccaggatcaaaagaagcctagaaaagaagcagtaatctacctctgccgataacctgtttaagatgactcagcagaacaccgcgtttcattctattggtcaattccatgtggctgactaggtcaattttttttctgaacaaaagcaggtttttatatgtaaacagtgagaaaagaaaggctaaacactatgtaaatgtgaatggaaacttggaaatactcgtttttataaactacaaaaactttttgttgtttatcaggaaatccatatttattttgtaattaactgtcaagcctgtggatgatttttttgaacttggtagttcataaaggtttacagtgaataaaaggatatcatcttgagtatagcaatatcaaaaggaattcagtagttactgctgtttaggaatataaggttaagatatcatatgggtcaggtcattttttttttctgtgctggttgccacatcttagcaagcaccaaaaaactaaagcagtttttaaaccgatatttacgtaaagaaaatcataaaatccaatgcttctgcatactgtgttatgttacagtccagttttgtgtgctttactacacagtttggttacaggacttctgtgcattgtaaacataaacagcatggaaaaggttaaatacctgtgttcagattgtaagatctagtccggacttgctgtgtatattgtaacgttaaatgaaaaaagaacccccctttgtattatagtcatgcggtcttatgtatgataaacagttgaataatttgtc

SEQ ID NO: 8346 - DNA, 2514 bp, Homo sapiens
ctctcgtcgcccccgctgtcccggcggcgccaaccgaagcgccccgcctgatccgtgtccgacatgctgcgccgcgctctgctgtgcctggccgtggccgccctggtgcgcgccgacgcccccgaggaggaggaccacgtcctggtgctgcggaaaagcaacttcgcggaggcgctggcggcccacaagtacctgctggtggagttctatgccccttggtgtggccactgcaaggctctggcccctgagtatgccaaagccgctgggaagctgaaggcagaaggttccgagatcaggttggccaaggtggacgccacggaggagtctgacctggcccagcagtacggcgtgcgcggctatcccaccatcaagttcttcaggaatggagacacggcttcccccaaggaatatacagctggcagagaggctgatgacatcgtgaactggctgaagaagcgcacgggcccggctgccaccaccctccgtgacggcgcagctgcagagtccttggtggagtccagcgaggtggctgtcatcggcttcttcaaggacgtggagtcggactctgccaagcagtttttgcaggcagcagaggccatcgatgacataccatttgggatcacttccaacagtgacgtgttctccaaataccagctcgacaaagatggggttgtcctctttaagaagtttgatgaaggccggaacaactttgaaggggaggtcaccaaggagaacctgctggactttatcaaacacaaccagctgccccttgtcatcgagttcaccgagcagacagccccgaagatttttggaggtgaaatcaagactcacatcctgctgttcttgcccaagagtgtgtctgactatgacggcaaactgagcaacttcaaaacagcagccgagagcttcaagggcaagatcctgttcatcttcatcgacagcgaccacaccgacaaccagcgcatcctcgagttctttggcctgaagaaggaagagtgcccggccgtgcgcctcatcaccctggaggaggagatgaccaagtacaagcccgaatcggaggagctgacggcagagaggatcacagagttctgccaccgcttcctggagggcaaaatcaagccccacctgatgagccaggagcgtgccggagactgggacaagcagcctgtcaaggtgcctgttgggaagaactttgaagacgtggcttttgatgagaaaaaaaacgtctttgtggagttctatgccccatggtgtggtcactgcaaacagttggctcccatttgggataaactgggagagacgtacaaggaccatgagaacatcgtcatcgccaagatggactcgactgccaacgaggtggaggccgtcaaagtgcacagcttccccacactcaagttctttcctgccagtgccgacaggacggtcattgattacaacggggaacgcacgctggatggttttaagaaattcctggagagcggtggccaggatggggcaggggatgatgacgatctcgaggacctggaagaagcagaggagccagacatggaggaagacgatgatcagaaagctgtgaaagatgaactgtaatacgcaaagccagacccgggcgctgccgagacccctcggggctgcacacccagcagcagcgcacgcctccgaagcctgcggcctcgcttgaaggaggcgtcgccggaaacccagggaacctctctgaagtgacacctcacccctacacaccgtccgttcacccccgtctcttccttctgcttttcggtttttggaaagggatccatctccaggcagcccaccctggtggcttgtttcctgaaaccatgatgtactttttcatacatgagtctgtccagagtgcttgctaccgtgttcggagtctcgctgcctccctcccgcgggaggtttctcctctttttgaaaattccgtctgtgggatttttagacatttttcgacatcagggtatttgttccaccttggccaggcctcctcggagaagcttgtcccccgtgtgggagggacggagccggactggacatggtcactcagtaccgcctgcagtgtcgccatgactgatcatggctcttgcatttttgggtaaatggagacttccggatcctgtcagggtgtcccccatgcctggaagaggagctggtggctgccagccctggcggcggcacagcctgggcctccccttccctcaagccagggctcctcctcctgtcgtgggctcatttgccaggctcaggccaggtctggacagctgtgactctcctcaagccaggactaccgaccagccggctatgggcacattacgtgaccactggcctctctacagcacggcctgtggcctgttcaaggcagaaccacgacccttgactcccgggtggggaggtggccaaggatgctggagctgaatcagacgctgacagttcttcaggcatttctatttcacaatcgaattgaacacattggccaaataaagttgaaattttaccacc

SEQ ID NO: 8347 - DNA, 1082 bp, Homo sapiens
actcattctccccagacgccaaggatggtggtcatggcaccccgaaccctcttcctgctactctcgggggccctgaccctgaccgagacctgggcgggctcccactccatgaggtatttcagcgccgccgtgtcccggcccggccgcggggagccccgcttcatcgccatgggctacgtggacgacacgcagttcgtgcggttcgacagcgactcggcgtgtccgaggatggagccgcgggcgccgtgggtggagcaggaggggccagagtattgggaagaggagacacggaacaccaaggcccacgcacagactgacagaatgaacctgcagaccctgcgcggctactacaaccagagcgaggccagttctcacaccctccagtggatgattggctgcgacctggggtccgacggacgcctcatccgcgggtatgaacggtatgcctacgatggcaaggattacctcgccctgaacgaggacctgcgctcctggaccgcagcggacactgcggctcagatctccaagcgcaagtgtgaggcggccaatgtggctgaacaaaggagagcctacctggagggcacgtgcgtggagtggctccacagatacctggagaacgggaaggagatgctgcagcgcgcggacccccccaagacacacgtgacccaccaccctgtctttgactatgaggccaccctgaggtgctgggccctgggcttctaccctgcggagatcatactgacctggcagcgggatggggaggaccagacccaggacgtggagctcgtggagaccaggcctgcaggggatggaaccttccagaagtgggcagctgtggtggtgccttctggagaggagcagagatacacgtgccatgtgcagcatgaggggctgccggagcccctcatgctgagatggaagcagtcttccctgcccaccatccccatcatgggtatcgttgctggcctggttgtccttgcagctgtagtcactggagctgcggtcgctgctgtgctgtggaggaagaagagctcagattgaaaaggagggagctactctcaggctgcaatgtgaaacagctg

SEQ ID NO: 8348 - DNA, 3239 bp, Homo sapiens
gagctccatcctgtgctcagggggtagacgagggccccaatgggctgaagctcatctcggaagtgattggggagcgcctcggcatccccatgagtgtgctgatgggggccaacattgccagcgaggtggctgatgagaagttctgtgagacaaccattggtgagagccccctggcacctgcatacacagtgcatctagttgcatcccctccccaaactgccccaaccccacttagccatctctttcccataaggcagagaaaggaaaatacaagcatcagaggtgaaggaggctgggacacccccagggaaggggcttcagggccttgcttagggaaacacagtgatgagccctccctcagagttggtgcagtggcacacctgtggtcccagctacttaagaggctgaggtgggaggatcgcttaagcccaggagtttaagtccagcctgggcaacagagagagactcccatctctataaaataaatattttttaaaaagagtccttccctcaaagccttgccccctcctcactttaggctgcaaggacccggcccaggacaactcctgaaagagctgatgcagacaccaaacttccgtatcacagtggtgcaagaggtggacactgtagagatctgtggagccttaaaggtgagaggggcacagaggcagctatggggtgaggagaaggccccaaaggaggtctggctgagctctgcaaggctgcaggtactccaggctctcactattgagcagtggttcccctttcctaccatgtcccatgcatataggaggagctgcagaagcaaggccagggccattcaggcggctgattattcatcatcagaccgtggacccccttgctcctgtcccattttagccccgtgtgggactccccaccctctggctccaggaggtggtcagggggacaaggagatgcccaggctaatgggagacaaaacatccttgacacccagacagactaatggccagaactatggatcctggacagctgttgacttagggctttacaatggaatggtcaatagatgggaagatcaactagagagaagagtggttttcagaaaatgtcctcgaggagggagtatggggcagggcttaagaaagggggtgcagcaaggggggaaaccaagaggcggaagtaggcttctaaaaggccacacactatacctctcttctgcagtgggtgtcacggctgatgaaatgagtatgagggggctccacatggggcctataggagggggtctttttctcacctatgacctccactccttcaagaatgtagtggccgtgggggctggcttctgtgatggcctgggctttggcgacaacaccaaggcggcagtgatccggctgggtctcatggagatgatagccttcgccaagctcttctgcagtggccctgtgtcctctgccaccttcttggagagctgtggtgttgctgacctgatcactacctgctatggagggcggaaccggaaagtggctgaggcctttgcgcgtacaggaaaggtgggccccgggagaagggagaacagaggggcggctctgtaggcatccaggtagaggtgcttggcgggaggcatctctggagcacaaacattaagactgttgtgcacatccccatccctcttttcctcccaagaccccactcccatctgagctccagtctctccaccccctactgacaacccagctgctcccttttccaagctttaccctgaccagtcatgagtggatattctgaacctgtttcatactgtcttcttctaggagtctttctcagaccagcacagctctgctctgatcagcccaatcacccccgctgtcaaccccacacgcctttggcacaatgaagtgggtaacctttatttcccttctttttctctttagctcggcttattccaggggtgtgtttcgtcgagatgcacacaagagtgaggttgctcatcggtttaaagatttgggagaagaaaatttcaaagccttggtgttgattgcctttgctcagtatcttcagcagtgtccatttgaagatcatgtaaaattagtgaatgaagtaactgaatttgcaaaaacatgtgttgctgatgagtcagctgaaaattgtgacaaatcacttcataccctttttggagacaaattatgcacagttgcaactcttcgtgaaacctatggtgaaatggctgactgctgtgcaaaacaagaacctgggagaaatgaatgcttcttgcaacacaaagatgacaacccaaacctcccccgattggtgagaccagaggttgatgtgatgtgcactgcttttcatgacaatgaagagacatttttgaaaaaatacttatatgaaattgccagaagacatccttacttttatgccccggaactccttttctttgctaaaaggtataaagctgcttttacagaatgttgccaagctgctgataaagctgcctgcctgttgccaaagctcgatgaacttcgggatgaagggaaggcttcgtctgccaaacagagactcaagtgtgccagtctccaaaaatttggagaaagagctttcaaagcatgggcagtagctcgcctgagccagagatttcccaaagctgagtttgcagaagtttccaagttagtgacagatcttaccaaagtccacacggaatgctgccatggagatctgcttgaatgtgctgatgacagggcggaccttgccaagtatatctgtgaaaatcaagattcgatctccagtaaactgaaggaatgctgtgaaaaacctctgttggaaaaatcccactgcattgccgaagtggaaaatgatgagatgcctgctgacttgccttcattagctgctgattttgttgaaagtaaggatgtttgcaaaaactatgctgaggcaaaggatgtcttcttgggcatgtttttgtatgaatatgcaagaaggcatcctgattactctgtcgtgctgctgctgagacttgccaagacatatgaaaccactctagagaagtgctgtgccgctgcagatcctcatgaatgctatgccaaagtgttcgatgaatttaaacctcttgtggaagagcctcagaatttaatcaaacaaaattgtgagctttttgagcagcttggagagtacaaattccagaatgcgctattagttcgttacaccaagaaagtaccccaagtgtcaactccaactcttgtagaggtctcaagaaacctaggaaa

SEQ ID NO: 8349 - DNA, 2428 bp, Homo sapiens
accttctgtatcagttaagtgtcaagatggaaggaacagcagtctcaagataatgcaaagagtttattcatccagaggctgatgctcaccatggggcgcctgcaactggttgtgttgggcctcacctgctgctgggcagtggcgagtgccgcgaagctgggcgccgtgtacacagaaggtgggttcgtggaaggcgtcaataagaagctcggcctcctgggtgactctgtggacatcttcaagggcatccccttcgcagctcccaccaaggccctggaaaatcctcagccacatcctggctggcaagggaccctgaaggccaagaacttcaagaagagatgcctgcaggccaccatcacccaggacagcacctacggggatgaagactgcctgtacctcaacatttgggtgccccagggcaggaagcaagtctcccgggacctgcccgttatgatctggatctatggaggcgccttcctcatggggtccggccatggggccaacttcctcaacaactacctgtatgacggcgaggagatcgccacacgcggaaacgtcatcgtggtcaccttcaactaccgtgtcggcccccttgggttcctcagcactggggacgccaatctgccaggtaactatggccttcgggatcagcacatggccattgcttgggtgaagaggaatatcgcggccttcgggggggaccccaacaacatcacgctcttcggggagtctgctggaggtgccagcgtctctctgcagaccctctccccctacaacaagggcctcatccggcgagccatcagccagagcggcgtggccctgagtccctgggtcatccagaaaaacccactcttctgggccaaaaaggtggctgagaaggtgggttgccctgtgggtgatgccgccaggatggcccagtgtctgaaggttactgatccccgagccctgacgctggcctataaggtgccgctggcaggcctggagtaccccatgctgcactatgtgggcttcgtccctgtcattgatggagacttcatccccgctgacccgatcaacctgtacgccaacgccgccgacatcgactatatagcaggcaccaacaacatggacggccacatcttcgccagcatcgacatgcctgccatcaacaagggcaacaagaaagtcacggaggaggacttctacaagctggtcagtgagttcacaatcaccaaggggctcagaggcgccaagacgacctttgatgtctacaccgagtcctgggcccaggacccatcccaggagaataagaagaagactgtggtggactttgagaccgatgtcctcttcctggtgcccaccgagattgccctagcccagcacagagccaatgccaagagtgccaagacctacgcctacctgttttcccatccctctcggatgcccgtctaccccaaatgggtgggggccgaccatgcagatgacattcagtacgttttcgggaagcccttcgccacccccacgggctaccggccccaagacaggacagtctctaaggccatgatcgcctactggaccaactttgccaaaacaggggaccccaacatgggcgactcggctgtgcccacacactgggaaccctacactacggaaaacagcggctacctggagatcaccaagaagatgggcagcagctccatgaagcggagcctgagaaccaacttcctgcgctactggaccctcacctatctggcgctgcccacagtgaccgaccaggaggccacccctgtgccccccacaggggactccgaggccactcccgtgccccccacgggtgactccgagaccgcccccgtgccgcccacgggtgactccggggccccccccgtgccgcccacgggtgactccggggccccccccgtgccgcccacgggtgactccggggccccccccgtgccgcccacgggtgactccggggccccccccgtgccgcccacgggtgactccggggccccccccgtgccgcccacgggtgactccggggccccccccgtgccgcccacgggtgactccggcgccccccccgtgccgcccacgggtgacgccgggcccccccccgtgccgcccacgggtgactccggcgccccccccgtgccgcccacgggtgactccggggccccccccgtgacccccacgggtgactccgagaccgcccccgtgccgcccacgggtgactccggggccccccctgtgccccccacgggtgactctgaggctgcccctgtgccccccacagatgactccaaggaagctcagatgcctgcagtcattaggttttagcgtcccatgagccttggtatcaagaggccacaagagtgggaccccaggggctcccctcccatcttgagctcttcctgaataaagcctcatacccctaaaaaaaaaaaaa

SEQ ID NO: 8350 - DNA, 3477 bp, Homo sapiens
accacctccacaacgattcccagatcgaagcggatttccgattgaatgattctcataaacacaaagataaacacaaagatcgagaacaccggcacaaagaacacaagaaggagaaggaccgggaaaagtccaagcatagcaacagtgaacataaagattctgaaaagaaacacaaagagaaggagaagaccaaacacaaagatggaagctcagaaaagcataaagacaaacataaagacagagacaaggaaaaacgaaaagaggaaaaggttcgagcctctggggatgcaaaaataaagaaggagaaggaaaatggcttctctagtccaccacaaattaaagatgaacctgaagatgatggctattttgttcctcctaaagaggatataaagccattaaagagacctcgagatgaggatgatgctgattataaacctaagaaaattaaaacagaagataccaagaaggagaagaaaagaaaactagaagaagaagaggatggtaaattgaaaaaacccaagaataaagataaagataaaaaagttcctgagccagataacaagaaaaagaagccgaagaaagaagaggaacagaagtggaaatggtgggaagaagagcgctatcctgaaggcatcaagtggaaattcctagaacataaaggtccagtatttgccccaccatatgagcctcttccagagaatgtcaagttttattatgatggtaaagtcatgaagctgagccccaaagcagaggaagtagctacgttctttgcaaaaatgctcgaccatgaatatactaccaaggaaatatttaggaaaaatttctttaaagactggagaaaggaaatgactaatgaagagaagaatattatcaccaacctaagcaaatgtgattttacccagatgagccagtatttcaaagcccagacggaagctcggaaacagatgagcaaggaagagaaactgaaaatcaaagaggagaatgaaaaattactgaaagaatatggattctgtattatggataaccacaaagagaggattgctaacttcaagatagagcctcctggacttttccgtggccgcggcaaccaccccaagacgggcatgctgaagagacgaatcatgcccgaggatataatcatcaactgtagcaaagatgccaaggttccttctcctcctccaggacataagtggaaagaagtccggcatgataacaaggttacttggctggtttcctggacagagaacatccaaggttccattaaatacatcatgcttaaccctagttcacgaatcaagggtgagaaggactggcagaaatacgagactgctcggcggctgaaaaaatgtgtggacaagatccggaaccagtatcgagaagactggaagtccaaagagatgaaagtccggcagagagctgtagccctgtacttcatcgacaagcttgctctgagagcaggcaatgaaaaggaggaaggagaaacagcggacactgtgggctgctgctcacttcgtgtggagcacatcaatctacacccagagttggatggtcaggaatatgtggtagagtttgacttcctcgggaaggactccatcagatactataacaaggtccctgttgagaaacgagtttttaagaacctacaactatttatggagaacaagcagcccgaggatgatctttttgatagactcaatactggtattctgaataagcatcttcaggatctcatggagggcttgacagccaaggtattccgtacatacaatgcctccatcacgctacagcagcagctaaaagaactgacagccccggatgagaacatcccagcgaagatcctttcttataaccgtgccaatcgagctgttgcaattctttgtaaccatcagagggcaccaccaaaaacctttgagaagtctatgatgaacttgcaaactaagattgatgccaagaaggaacagctagcagatgcccggagagacctgaaaagtgctaaggctgatgccaaggtcatgaaggatgcaaagacgaagaaggtagtagagtcaaagaagaaggctgttcagagactggaggaacagttgatgaagctggaagttcaagccacagaccgagaggaaaataaacagattgccctgggaacctccaaactcagttatctggaccctaggatcacagtggcttggtgcaagaagtggggtgtcccaattgagaagatttacaacaaaacccagcgggagaagtttgcctgggccattgacatggctgatgaagactatgagttttagccagtctcaagaggcagagttctgtgaagaggaacagtgtggtttgggaaagatggataaactgagcctcacttgccctcgtgcctgggggagagaggcagcaagtcttaacaaaccaacatctttgcgaaaagataaacctggagatattataagggagagctgagccagttgtcctatggacaacttatttaaaaatatttcagatatcaaaattctagctgtatgatttgttttgaattttgtttttattttcaagagggcaagtggatgggaatttgtcagcgttctaccaggcaaattcactgtttcactgaaatgtttggattctcttagctactgtatgcaaagtccgattatattggtgcgtttttacagttagggttttgcaataacttctatattttaatagaaataaattcctaaactcccttccctctctcccatttcaggaatttaaaattaagtagaacaaaaaacccagcgcacctgttagagtcgtcactctctattgtcatggggatcaattttcattaaacttgaagcagtcgtggctttggcagtgttttggttcagacacctgttcacagaaaaagcatgatgggaaaatatttcctgacttgagtgttcctttttaaatgtgaattttttttttttttaattattttaaaatatttaaacctttttcttgatcttaaagatcgtgtagattggggttggggagggatgaagggcgagtgaatctaaggataatgaaataatcagtgactgaaaccattttcccatcatcctttgttctgagcattcgctgtaccctttaagatatccatctttttctttttaaccctaatctttcacttgaaagattttattgtataaaaagtttcacaggtcaataaacttagaggaaaatgagtatttggtccaaaaaaaggaaaaataatcaagattttagggcttttattttttcttttgtaattgtgtaaaaaatggaaaaaaacataaaaagcagaattttaatgtgaagacattttttgctataatcattagttttagaggcattgttagtttagtgtgtgtgcagagtccatttcccacatctttcctcaagtatcttctatttttatcatgaattcccttttaatcaactgtaggttatttaaaataaattcctacaacttaatggaaa

SEQ ID NO: 8351 - DNA, 147 bp, Homo sapiens; identical to SEQ ID NO: 6947

SEQ ID NO: 8352 - DNA, 914 bp, Homo sapiens; identical to SEQ ID NO: 3242

SEQ ID NO: 8353 - DNA, 4199 bp, Homo sapiens
cgtgttgatgatggagtagcttcctttgtgcttaatctcccatctggagtgacggtgctggagtttaatgtcaaaactgatgctccagatcttccagaagaaaatcaggccagggaaggttaccgagcaatagcatactcatctctcagccaaagttacctttatattgattggactgataaccataaggctttgctagtgggagaacatctgaatattattgttacccccaaaagcccatatattgacaaaataactcactataattacttgattttatccaagggcaaaattatccactttggcacgagggagaaattttcagatgcatcttatcaaagtataaacattccagtaacacagaacatggttccttcatcccgacttctggtctattatatcgtcacaggagaacagacagcagaattagtgtctgattcagtctggttaaatattgaagaaaaatgtggcaaccagctccaggttcatctgtctcctgatgcagatgcatattctccaggccaaactgtgtctcttaatatggcaactggaatggattcctgggtggcattagcagcagtggacagtgctgtgtatggagtccaaagaggagccaaaaagcccttggaaagagtatttcaattcttagagaagagtgatctgggctgtggggcaggtggtggcctcaacaatgccaatgtgttccacctagctggacttaccttcctcactaatgcaaatgcagatgactcccaagaaaatgatgaaccttgtaaagaaattctcaggccaagaagaacgctgcaaaagaagatagaagaaatagctgctaaatataaacattcagtagtgaagaaatgttgttacgatggagcctgcgttaataatgatgaaacctgtgagcagcgagctgcacggattagtttagggccaagatgcatcaaagctttcactgaatgttgtgtcgtcgcaagccagctccgtgctaatatctctcataaagacatgcaattgggaaggctacacatgaagaccctgttaccagtaagcaagccagaaattcggagttattttccagaaagctggttgtgggaagttcatcttgttcccagaagaaaacagttgcagtttgccctacctgattctctaaccacctgggaaattcaaggcattggcatttcaaacactggtatatgtgttgctgatactgtcaaggcaaaggtgttcaaagatgtcttcctggaaatgaatataccatattctgttgtacgaggagaacagatccaattgaaaggaactgtttacaactataggacttctgggatgcagttctgtgttaaaatgtctgctgtggagggaatctgcacttcggaaagcccagtcattgatcatcagggcacaaagtcctccaaatgtgtgcgccagaaagtagagggctcctccagtcacttggtgacattcactgtgcttcctctggaaattggccttcacaacatcaatttttcactggagacttggtttggaaaagaaatcttagtaaaaacattacgagtggtgccagaaggtgtcaaaagggaaagctattctggtgttactttggatcctaggggtatttatggtaccattagcagacgaaaggagttcccatacaggatacccttagatttggtccccaaaacagaaatcaaaaggattttgagtgtaaaaggactgcttgtaggtgagatcttgtctgcagttctaagtcaggaaggcatcaatatcctaacccacctccccaaagggagtgcagaggcggagctgatgagcgttgtcccagtattctatgtttttcactacctggaaacaggaaatcattggaacatttttcattctgacccattaattgaaaagcagaaactgaagaaaaaattaaaagaagggatgttgagcattatgtcctacagaaatgctgactactcttacagtgtgtggaagggtggaagtgctagcacttggttaacagcttttgctttaagagtacttggacaagtaaataaatacgtagagcagaaccaaaattcaatttgtaattctttattgtggctagttgagaattatcaattagataatggatctttcaaggaaaattcacagtatcaaccaataaaattacagggtaccttgcctgttgaagcccgagagaacagcttatatcttacagcctttactgtgattggaattagaaaggctttcgatatatgccccctggtgaaaatcgacacagctctaattaaagctgacaactttctgcttgaaaatacactgccagcccagagcacctttacattggccatttctgcgtatgctctttccctgggagataaaactcacccacagtttcgttcaattgtttcagctttgaagagagaagctttggttaaaggtaatccacccatttatcgtttttggaaagacaatcttcagcataaagacagctctgtacctaacactggtacggcacgtatggtagaaacaactgcctatgctttactcaccagtctgaacttgaaagatataaattatgttaacccagtcatcaaatggctatcagaagagcagaggtatggaggtggcttttattcaacccaggacacaatcaatgccattgagggcctgacggaatattcactcctggttaaacaactccgcttgagtatggacatcgatgtttcttacaagcataaaggtgccttacataattataaaatgacagacaagaatttccttgggaggccagtagaggtgcttctcaatgatgacctcattgtcagtacaggatttggcagtggcttggctacagtacatgtaacaactgtagttcacaaaaccagtacctctgaggaagtttgcagcttttatttgaaaatcgatactcaggatattgaagcatcccactacagaggctacggaaactctgattacaaacgcatagtagcatgtgccagctacaagcccagcagggaagaatcatcatctggatcctctcatgcggtgatggacatctccttgcctactggaatcagtgcaaatgaagaagacttaaaagcccttgtggaaggggtggatcaactattcactgattaccaaatcaaagatggacatgttattctgcaactgaattcgattccctccagtgatttcctttgtgtacgattccggatatttgaactctttgaagttgggtttctcagtcctgccactttcacagtgtacgaataccacagaccagataaacagtgtaccatgttttatagcacttccaatatcaaaattcagaaagtctgtgaaggagccgcgtgcaagtgtgtagaagctgattgtgggcaaatgcaggaagaattggatctgacaatctctgcagagacaagaaaacaaacagcatgtaaaccagagattgcatatgcttataaagttagcatcacatccatcactgtagaaaatgtttttgtcaagtacaaggcaacccttctggatatctacaaaactggggaagctgttgctgagaaagactctgagattaccttcattaaaaaggtaacctgtactaacgctgagctggtaaaaggaagacagtacttaattatgggtaaagaagccctccagataaaatacaatttcagtttcaggtacatctaccctttagattccttgacctggattgaatactggcctagagacacaacatgttcatcgtgtcaagcatttttagctaatttagatgaatttgccgaagatatctttttaaatggatgctaaaattcctgaagttcagctgcatacagtttgcacttatggactcctgttgttgaagttcgtttttttgttttcttctttttttaaacattcatagctggtcttatttgtaaagctcactttacttagaattagtggcacttgcttttattagagaatgatttcaaatgctgtaactttctgaaataacatggccttggagggcatgaagacagatactcctccaaggttattggacaccggaaacaataaattggaacacctcctcaaacctaccactcaggaatgtttgctggggccgaaagaacagtccattgaaagggagtattacaaaaacatggcctttgcttgaaagaaaataccaaggaacaggaaactgatcattaaagcctgagtttgctttc

SEQ ID NO: 8354 - DNA, 2633 bp, Homo sapiens
ggattctctctccaacccaagtgcctccagctgacctctggctcctgtcctctggctccacctgcaccgccctgctcttcctaaggggccaggaagcccccagaagctctaccatcgacgtgggtggtggcacccggctcaccctgagagcagaggccgtgcagggggctcagttctgagccccagccggcccaccatggcacggcggttccaggaggagctggccgccttcctcttcgagtatgacaccccccgcatggtgctggtgcgtaataagaaggtgggcgttatcttccgactgatccagctggtggtcctggtctacgtcatcgggtgggtgtttctctatgagaagggctaccagacctcgagcggcctcatcagcagtgtctctgtgaaactcaagggcctggccgtgacccagctccctggcctcggcccccaggtctgggatgtggctgactacgtcttcccagcccagggggacaactccttcgtggtcatgaccaatttcatcgtgaccccgaagcagactcaaggctactgcgcagagcacccagaagggggcatatgcaaggaagacagtggctgtacccctgggaaggccaagaggaaggcccaaggcatccgcacgggcaagtgtgtggccttcaacgacactgtgaagacgtgtgagatctttggctggtgccccgtggaggtggatgacgacatcccgcgccctgcccttctccgagaggccgagaacttcactcttttcatcaagaacagcatcagctttccacgcttcaaggtcaacaggcgcaacctggtggaggaggtgaatgctgcccacatgaagacctgcctctttcacaagaccctgcaccccctgtgcccagtcttccagcttggctacgtggtgcaagagtcaggccagaacttcagcaccctggctgagaagggtggagtggttggcatcaccatcgactggcactgtgacctggactggcacgtacggcactgcagacccatctatgagttccatgggctgtacgaagagaaaaatctctccccaggcttcaacttcaggtttgccaggcactttgtggagaacgggaccaactaccgtcacctcttcaaggtgtttgggattcgctttgacatcctggtggacggcaaggccgggaagtttgacatcatccctacaatgaccaccatcggctctggaattggcatctttggggtggccacagttctctgtgacctgctgctgcttcacatcctgcctaagaggcactactacaagcagaagaagttcaaatacgctgaggacatggggccaggggcggctgagcgtgacctcgcagctaccagctccaccctgggcctgcaggagaacatgaggacatcctgatgctcgggccccaactcctgactgggtacagcgtgaggcttcagcctggagccctggtgggtcccagccagggcagaggggcctccccaggaagtctcctaccctctcagccgggcagagagcagtttgccagaagctcagggtgcatagtaggagagacctgtgcaaatctgagctccggctccgaccccacacaccctgagggagccctaccctagcctcagccgctcctggtggggaatggctggggctgggcaggaccctcccacacacctgcaccctagcttcgtgcttctctctccggactctcattatccaacccgctgcctccatttctctagatctgtgctctccgatgtggcagtcagtaaccataggtgactaaattaaactaaaataaaatagaatgaaacacaaaattcaattcctcggctgaactagccacatttcaactgctcagtagatacgtgtggttagtggctgccatactggacagctcggggcattttcactgtcaaagaaagttctattagacagccctgcttgagccctgtttcttcctggccttcggtttccctggggaacttatcgacaatgcaagctcctgggcccacccccagacctcctgaaccaaaagctccagggctggccgtatgatctgtgtggatggcaaactccccaggccattctgggacctaagtttaagaagtgccgtcctcgaactttctgactctaagctcctgagcgggagtcagacttagccctgagcctgcacttcctgttcaggtgcagacactgaacagggtctcaaacaccttcagcatgtgtgttgtgtgctcacgtgccacacagtgtctcatgcacacaacccagtgtacacaccacctacgtgcacacagcatccttccacactgtgtatgtgaacagcttgggccctgcaaacacaaccatctacacacatctacacccccaagcacacacacatggtccgtgccatgtcacctccatagggaaaggcttctctccaagtgtgccaggccaggacagccctcccagccatgaatccttactcagctacctcgggttggggtgggagccccagccaaatcctgggctccctgcctgtggctcagccccagctcccaaggcctgcctggctctgtctgaacagaaggtctgggggaagcgaggggtggagtacaataaagggaatgaggacgaaaaaaaaaaaaaaaaa

SEQ ID NO: 8355 - DNA, 3454 bp, Homo sapiens
cgcgcggccaggccctcttagccctctgccgtttggggggcacgggtgaacctgccgccccactcccaccccgccccgccccgcccgtacagacaaatcggaagggacgagcctgccctttgaaagggttttttttcttgctcctgcggagggcgccccagccatggccctcaggagctccctagaccccgcagggactgccctccatcccggccgccggggcccgccctctgcatcccgcgggcagcctgtgtgaagcggcctcccgcagcccccggcccctcccccatggaggaggaggagggggcggtggccaaggagtggggcacgacccccgcggggcccgtctggaccgcggtgttcgactacgaggcggcgggcgacgaggagctgaccctgcggaggggcgatcgcgtccaggtgctttcccaagactgtgcggtgtccggcgacgagggctggtggaccgggcagctccccagcggccgcgtgggcgtcttccccagcaactacgtggcccccggcgcccccgctgcacccgcgggcctccagctgccccaggagatccccttccacgagctgcagctagaggagatcatcggtgtggggggctttggcaaggtctatcgggccctgtggcgtggcgaggaggtggcagtcaaggccgcccggctggaccctgagaaggacccggcagtgacagcggagcaggtgtgccaggaagcccggctctttggagccctgcagcaccccaacataattgcccttaggggcgcctgcctcaaccccccacacctctgcctagtgatggagtatgcccggggtggtgcactgagcagggtgctggcaggtcgccgggtgccacctcacgtgctggtcaactgggctgtgcaggtggcccggggcatgaactacctacacaatgatgcccctgtgcccatcatccaccgggacctcaagtccatcaacatcctgatcctggaggccatcgagaaccacaacctcgcagacacggtgctcaagatcacggacttcggcctcgcccgcgagtggcacaagaccaccaagatgagcgctgcggggacctacgcctggatggcgccggaggttatccgtctctccctcttctccaaaagcagtgatgtctggagcttcggggtgctgctgtgggagctgctgacgggggaggtcccctaccgtgagatcgacgccttggccgtggcgtatggcgtggctatgaataagctgacgctgcccattccctccacgtgccccgagccctttgcccgcctcctggaggaatgctgggacccagacccccacgggcggccagatttcggtagcatcttgaagcggcttgaagtcatcgaacagtcagccctgttccagatgccactggagtccttccactcgctgcaggaagactggaagctggagattcagcacatgtttgatgaccttcggaccaaggagaaggagcttcggagccgtgaggaggagctgctgcgggcggcacaggagcagcgcttccaggaggagcagctgcggcggcgggagcaggagctggcagaacgtgagatggacatcgtggaacgggagctgcacctgctcatgtgccagctgagccaggagaagccccgggtccgcaagcgcaagggcaacttcaagcgcagccgcctgctcaagctgcgggaaggcggcagccacatcagcctgccctctggctttgagcataagatcacagtccaggcctctccaactctggataagcggaaaggatccgatggggccagcccccctgcaagccccagcatcatcccccggctgagggccattcgcctgactcccgtggactgtggtggcagcagcagtggcagcagcagtggaggaagtgggacatggagccgcggtgggcccccaaagaaggaagaactggtcgggggcaagaagaagggacgaacgtgggggcccagctccaccctgcagaaggagcgggtgggaggagaggagaggctgaaggggctgggggaaggaagcaaacagtggtcatcaagtgcccccaacctgggcaagtcccccaaacacacacccatcgcccctggcttcgccagcctcaatgagatggaggagttcgcggaggcagaggatggaggcagcagcgtgcccccttccccctactcgaccccgtcctacctctcagtgccactgcctgccgagccctccccgggggcgcgggcgccgtgggagccgacgccgtccgcgccccccgctcggtggggacacggcgcccggcggcgctgcgacctggcgctgctaggctgcgccacgctgctgggggctgtgggcctgggcgccgacgtggccgaggcgcgcgcggccgacggtgaggagcagcggcgctggctcgacggcctcttctttccccgcgccggccgcttcccgcggggcctcagcccacccgcgcgtccccacggccgccgcgaagacgtgggccccggcctgggcctggcgccctcggccaccctcgtgtcgctgtcgtccgtgtccgactgcaactccacgcgttcactgctgcgctctgacagtgacgaggccgcaccggccgcgccctccccaccaccctccccgcccgcgcccacacccacgccctcgcccagcaccaaccccctggtggacctggagctggagagcttcaagaaggaccccggccagtcgctcacgcccacccacgtcacggctgtatgcgctgtgagccgcgggcaccggcggacgccatcggatggggcgctggggcagcgggggccgcccgagcccgcgggccatggccctggccctcgtgaccttctggacttcccccgcctgcccgacccccaggctctgttcccagcccgccgccggccccctgagttcccaggccgccccaccaccctgacctttgccccgagacctcggccggctgccagtcgcccccgcttggacccctggaaactggtctccttcggccggacactcaccatctcgcctcccagcaggccagacactccggagagccctgggccccccagcgtgcagcccacactgctggacatggacatggaggggcagaaccaagacagcacagtgcccctgtgcggggcccacggctcccactaaggcctgcccaccaccgcccgcctgggcagccatgaatgtagcgccccaggccctgccccagcccgccatgccacaaggtgggggaggccctgggcaggatgttcactctatttattggggaaggagggaggggggggacacttaacttattcctttgtaccccagggggtggagccctgtgcccaccctgcactggggggagggtgggcagggatactcagggacagggcatcatgggggatttggcacaaaatggaacaataaaggtaaccccttgcccccccccccaaaaaaaaaaaaa

SEQ ID NO: 8356 - DNA, 141 bp, Homo sapiens
atgcagcctgacatcccgtttccccaggccagaggtaggtttgaagtgaggtctgtgtcactgtggtattatgattacgtttgggggtaagactacggtatggacgtctggggccaaggaaccacggtcaccgtctcctca

SEQ ID NO: 8357 - DNA, 1922 bp, Homo sapiens; identical to SEQ ID NO: 687

SEQ ID NO: 8358 - DNA, 929 bp, Homo sapiens; identical to SEQ ID NO: 6972

SEQ ID NO: 8359 - DNA, 314 bp, Homo sapiens
  misc_feature (1)..(314): n=a,t,g or c
aatacaacatatggagttacagctgatcaaaaaagagatcacaggaattggacccagtaccacaacagaaacagaaacaatcgccaaatatgaaataatggatggtgcacaagtaanaggtgaatcaattccaataaggctatttttagcaggatatgacccaactccaacaatgagagatgtgaacaaaaaattttcagtaaggtactttttgaatttagtgcttgttgatgaggaagaccggagtacttcaaacagcaggagataattttatggagaaaagctcctgaaaaacttgaggaaacagagaacaa

SEQ ID NO: 8360 - DNA, 408 bp, Homo sapiens
aaaaagccaaatgcttaaactgatcaatgactgtagctttttagactgttggtcaaagaacattctacttcacagtaatagctctatcagccacagatctcatggtggctgttgcatgataatgataggataaacaaaataccactgtcttcaagaaacattatcttaggtttgtttgtttggtttgagtttgatttggcttttatattttttaaaatcccttttgctaccccatctggttttataaactgagtttcttagcattcgttaaaattaaggggtttgtttggaataatatatattttttatgcttttgtctttcttacctgattgatattacattcacctttgattgttttttaaaagtttatttttacagaatatatttagtacctttcttaaggagta

SEQ ID NO: 8361 - DNA, 431 bp, Homo sapiens
ggtgtacatctattcctcagggagtgtggaggcacagaaactgttattcgggcattctacggagggagatattcttgagcttgttgatggtcactttgataccaagattggacacaaagtagagagtgaaagttaccgcaagattgcagacagcattgggtgctcaaccaacaacattttgtttctgacagatgttactcgagaggccagtcctgctgaggaagcagatgtgcacgtagctgtggtggtgagaccaggcaacgcaggattaacagatgatgagaagacttactacagcctcatcacatccttcagtgaactatacctcccttcctcaacctagagaagggttgttaaggcagaccgccctgttccccagagttgtccctctagtgtctaggttattctaatggtaaaggtaacttacttaa

SEQ ID NO: 8362 - DNA, 542 bp, Homo sapiens
tttttggaaagtaactacaccatattcattgtttaaaactctttactgatgtacatgttttaataaaacaaataaccaaaaaaaatacacaaatccatagttatttaaaaacttaggatttttaaaaaacatgtctataaaaatacaacgtttaaggcagtttggaaatgcatttgtacatttctacaacgtccataaattctcttgaaaataagaatgttaacttcaattctataaaatacactgtacattttaagactgttctaaatatagcacacttcaatggactgtgggttttgattcctgatgacaaatggattctatacatttcaggggggaaaggtgtaatatggatgtgagtttaaaacttttaatttctttttaaaaataaattatttctgaagcatacaatttataaaaattctatatacaaagtacagcaactggtaacaaaccccagttttaatacattttatatacgatgtaccagggtttagcaacctgataggagcagaggcaatatacattctccgcatatttaa

SEQ ID NO: 8363 - DNA, 3088 bp, Homo sapiens; identical to SEQ ID NO: 3072

SEQ ID NO: 8364 - DNA, 314 bp, Homo sapiens
ttttttttttttttttttttcttccctttcccagcccattgtttttattttttaatcagttttaggaaagtataacttatatacaataaaaggcacccttcttaaatgcacagtttgatgagttttgacaaatgtttaagcagtacagccatcaccataattaagatatacaatatttccatcacatcaagaagttgtctcatctccttcatggtcagtctgctgttcctggcaatcactgatcgattttctgttcctatagatttgccttttctggagagtccatataagtgcaggaattttcgtttgtagcc

SEQ ID NO: 8365 - DNA, 233 bp, Homo sapiens; identical to SEQ ID NO: 1702

SEQ ID NO: 8366 - DNA, 253 bp, Homo sapiens; identical to SEQ ID NO: 3143

SEQ ID NO: 8367 - DNA, 263 bp, Homo sapiens; identical to SEQ ID NO: 1724
  misc_feature (1)..(263): n=a,t,g or c

SEQ ID NO: 8368 - DNA, 259 bp, Homo sapiens
  misc_feature (1)..(259): n=a,t,g or c
catgtttattgttgttttatttagtgttataattggaaatgtggaaaacacaagagataaccatagtcataatatacaaggcttccttataatgagtactttttnctacaacctcatagaattatggtaagtgtattattttaaaaggngantttagtaggntaaaacacactgaattttagtccaactacagctatgtacatatgcatacataatttatgagctatgtataattnatatgtatacaaacaccacattt

SEQ ID NO: 8369 - DNA, 325 bp, Homo sapiens; identical to SEQ ID NO: 1730
  misc_feature (1)..(325): n=a,t,g or c

SEQ ID NO: 8370 - DNA, 445 bp, Homo sapiens
  misc_feature (1)..(445): n=a,t,g or c
tttttttttaatgtccaacagataactaaaattcaaattttatttttccatatttatcagacaatttttttctgacaagactttactgaaagatgaagtgcaaatgggaaccctgtaaaaatgtttataagagttgtacatgacatattttaagcgccgctaagtacacattgaatactttgtaagtatataggcatatcaacatgcaagtgtcatgtaccaaatattacaatatgcattttgttttttgaaaatgttaatgacaagagtagattcaataactgtgtttctctactttctgtgcttatatggttaatttgttgggatcttctttataggcacagaatttattttttatgctgtncattaaatatacccttccaaaagttatggattatcatgtcatataaataggcacattttttttttggaggctacttacggg

SEQ ID NO: 8371 - DNA, 461 bp, Homo sapiens
tttttgcctttatgcagaaacaggccttaaatcaactgtataacaaatcttcctctatcaataagtttggctggtaaagaaagtttctgggtaaggaacaaatagaattatagccccacttactttaccacataatcagctttgctaataagaaaattcagagctaaaatagaagatcgaaacatttggcttgcctaagtacttaccacgttttaaagttgctctgtgctgcttattttaggtagggtgaatgcaaaatataaactttaaaaaaaaaacattgttttatttatttagttagttttttagagacagagtcttactatgttgcccggctggactctaactcctggggctcaagcaatcctcccacatcagcctccccagtaggctgggattccgggcacgtccagcagcaaaatatcttaatatacatggggcattaaaattcacacaggggt

SEQ ID NO: 8372 - DNA, 306 bp, Homo sapiens
tatggcataatctctgtcctttgtatcatctgtacttttatacctccttgccttctttttttttctgacccttttgttgttgttgttatttagcaattcttaacaggatggattagaggacacagtggagattaaaactccaatagttaattgtcctgatgaaatgttggcattgcattgtctggattaaatgtatttatctctggccttgttactcactgataaactaatacagttgtatgaaatgggatattctgtatgctttaaacaacctttaaattaaaaactaggtgcttttggattact

SEQ ID NO: 8373 - DNA, 336 bp, Homo sapiens
  misc_feature (1)..(336): n=a,t,g or c
ctnnaaatatcaaaagaagtttattaaaatacatattttgttatacataaaacttagaaatatttcaagatttacatacatcaacttttgcaatcttcctgctggtaaaaatacaaaacagcagcataagaaccagttactcatatactcaactatattcatgcatacttaacaaaatgaaaagttctcctaaaaactggcaagatacaaaatgtcaaatctaaaatgatatatatacttacgtttttaggcattcttacaggattacaaacccttaccaacattaatcttgggcctactttaaagttgagtgataggcatggaactctggaaaag

SEQ ID NO: 8374 - DNA, 384 bp, Homo sapiens
  misc_feature (1)..(384): n=a,t,g or c
atcattttaaaaagggctttaatactgtttaagtagttcaaataggcttcctcactattaatttgcttcagtaaactcttcagcttaactcattatcttaaatttcagaattaatgaggttttactgtaaaagtagaaaagcaaacacttcaaatgataagactccagtatcacccatactaaaancttaggcaataaaactgcagtttgaaaagctactgtacaatgcagcaaggactaggtgtcaatactgctggaagcgtagccagggtaaaggancaggaaatctgcacagtnttatccctgtgggttcttagnctcattcggaantacaggaactgcaatctcacaatggnaacaaacatactggcttnttaggggggg

SEQ ID NO: 8375 - DNA, 330 bp, Homo sapiens; identical to SEQ ID NO: 453

SEQ ID NO: 8376 - DNA, 417 bp, Homo sapiens
aaattggcattctatatatttgagaaactaatgtataaaaattcaagataattacaattggaaggggaccaataattccactttttaatcgaaaataatctatatactcccaataaactcacagtaaaataagcttcaaaaagccttaagacaccaaaagaggaaaaaaagccagtaattagaacaaaatgtgtaatgtggttaatagtatagatatgcttgcctttagacaattcttatatactcaattcttacatgattgaaagattctgtaataatgctctacctttttataaagaaaaaagtaggtttccaaaagaaaattaaacgtttatgactggagttagcggtagtaaggaattagatgtgagtggttgactgctctttgtgccttcgacattttgcagaaaattctgt

SEQ ID NO: 8377 - DNA, 385 bp, Homo sapiens
ctttttaaattatatagtcccatggattttcaaatattttatactagttatataataacactattttaaaaactatatagaataaacagcactgaggagagatgaagcaatagaaaggtcaaagttcaaacttgttaaaatatgtttggctttgtttccctaaggttggaattattaaactggtgtgactttagaaggttttcgaggaattggtgtgtgttactgcagaatcactagctcttaatttgtaatttgatggctaaaaacggacaagtcacttaaaggaatatatcgtattaaaaagttactttccttgacatttggccaccagtcagccctgtctcccctagcctctgtctgaaagtatggaaagacatttagcctg

SEQ ID NO: 8378 - DNA, 345 bp, Homo sapiens; identical to SEQ ID NO: 7896

SEQ ID NO: 8379 - DNA, 399 bp, Homo sapiens
  misc_feature (1)..(399): n=a,t,g or c
ttttaattaaccagtgtaaaaatagtgccttcaaaatggaatattctcacaaataaaagccaagcaacttcttagtgaatctgacagaaaaagtcattctcagtaacagcttcctccaaaaatttttcccattaatgcacatactttttggcttgtattactgaaatgttgctttacctttccatttccccttacttgtaggaggattcattctgatgggctaatttgatgtttatttaggttctggaaaaaagggntaattaggaaattagggggggggtgcaggatccggtggttatttttaaacctaacccnggtaaagtcaagggaaatattatcccncagggcccnccactncattaggttgcctagggccaaatggtaaatgcaggggggttt

SEQ ID NO: 8380 - DNA, 304 bp, Homo sapiens
  misc_feature (1)..(304): n=a,t,g or c
tttttttttggatcattatattttcttgaatattcattcaagtttcaatttaatacttaaacattcattttcgaataaaaatactatgtcttgtactagggatacaaagacttggttattcttgttggagtaatgattctcctctatctggggaggtcatcctctgcagttggggactgaaggactgggagatgggagattgaaacttaaagagggtaaaggtatgtcttgggantaaaactagttatcagtcaccacccngaccatcatgggcggctnggatttccaggaaccggtgattggg

SEQ ID NO: 8381 - DNA, 171 bp, Homo sapiens
  misc_feature (1)..(171): n=a,t,g or c
tttttttaagaaaggtagataaatttattgccacttgaaaactaaatataactcagaatgagtcagacaaaaaaaatcattgacattaaaattattattatttgaccnggtttgtcttttgaagaatttctctcacaggcacttctgcaacaaatttgtataatttaatat

SEQ ID NO: 8382 - DNA, 278 bp, Homo sapiens
  misc_feature (1)..(278): n=a,t,g or c
tttttttttttttttttacttgaactaataaagtttattaatgtcacaaaatacgagattaatatacaagatgaaataatacttttatataacagtaatcgacatactaaaaattaagtcaagaaaaaatttaataataacattggaaaaaccatttgggaacatatttttaaaagcaagtacacatactttacagtgaaanttatttaaaatgctggaaggaaatttttaaaactgtataggggaaggatatatctaatattccagggttatcaata

SEQ ID NO: 8383 - DNA, 384 bp, Homo sapiens
  misc_feature (1)..(384): n=a,t,g or c
tttcttttgaaaaggaaagatatatatatttaatatataaaagaaaatgctaaatctgacataattatattcttaaaaacattccatttatttacagatgtataaaaaggtgaattattggtctattgagatcatgcttcttatagtnttagggtgagagctcactgtcttccacgttcctcaactcctctcactcaacttcacctttcataatcacacatgtaatattcataggatcagttccccctaggggtaagggttaaagggtagggagtttttgggaggattttaggatttctgtcaaggactgcagggattgttctgaaggactaaggccctcctcaaattatccctggacaacacctaggttctaggggggtcttg

SEQ ID NO: 8384 - DNA, 382 bp, Homo sapiens
  misc_feature (1)..(382): n=a,t,g or c
ataaagagcnaattnctttattctgaagataatggggagacactgaaatatttgaatcaagaatgatgtgatgagattggcagttcaaataccggtcaagtgaaaggcctgaaataaggcagcggctgtattagaaaagtggacagattgcagaggtaaaatcattagaatagctgtttccatgtggggagggggatgagagaaagtccttgagccgacaaggactcccaagtttctctgtgggatgatgggtatattgattttttttgtcatcattgggtaaaggaaaacacaagagggggggaaatatttctggaaccntacctagtagggggccctgccncataggtagggtgtttccattaatnggctgttttgaacc

SEQ ID NO: 8385 - DNA, 391 bp, Homo sapiens
  misc_feature (1)..(391): n=a,t,g or c
ttttttttttactgtttggaaaaatttttattcactggaaaaatgtttataaagaaatattaagtgaaatgttgagaaatatatagaactttacataaaatatattagccatgcaaatacatgagtgtacgctttctgtggatagacataaatattgctagagaaaaaaatagaaaagaatccatcaagggcattaactacacatttttctacgttaccagtatcttaggtgttctagggtgtaggttattaaaatttccttctctgtactttctaaaattttaataatagggatgtgctttttaaaataatttttttaacttggatatctcacctggtcncctgaggttccccttttctccaacttaatggggggcttaaccggcccnct

SEQ ID NO: 8386 - DNA, 284 bp, Homo sapiens
  misc_feature (1)..(284): n=a,t,g or c
ttttttttttggtagttaaaacagaaggtttcaataaaatcgacagtctgataacataatacccaaaagtccaagtttccattgaaaatcattcatcataccaagaaccaggaaaatctcatactgaatgaaaataggcagcaagcacacactggcaataaaatgagagaagcgctgggattgtctgacaaacattttaaagcaagcaagcctgatgaaaatgatttagcgagtaattatgagcacacttgaaataaatggacaagtaggaaagtcttaggcaa

SEQ ID NO: 8387 - DNA, 398 bp, Homo sapiens
  misc_feature (1)..(398): n=a,t,g or c
ttttttttttgccccaagaaaacgttnacccagtgatcttgggctggggttgtctttaggaaaagttgagactataagagtcataaataagtccttgtgtttccttaatttatnttgttaacacccctaattacaaccaaagtgatgatgtggagtcttctgtcttcattttggccccagcattcttaatttcaaagctttattctgtctgcctaagagaatcaaccaaaggtgattctcctaaagagcagtgaaggaaatgtcaggttagcaggacccaagttttgggtgtgaaatgttgccagcttcctataatgtaaacggacttgttaacctaacctaattatgctcagtggacttctnttagatggttttgaaaaatgaactgagctgacttt

SEQ ID NO: 8388 - DNA, 364 bp, Homo sapiens; identical to SEQ ID NO: 2892
  misc_feature (1)..(364): n=a,t,g or c

SEQ ID NO: 8389 - DNA, 430 bp, Homo sapiens; identical to SEQ ID NO: 4724
  misc_feature (1)..(430): n=a,t,g or c

SEQ ID NO: 8390 - DNA, 417 bp, Homo sapiens
  misc_feature (1)..(417): n=a,t,g or c
ttttttttttttttttttttttttgagccaaagagaagaaatgatttattaacatggggacaccaagaaaaacaaagtatgcttttattccctttgtcaagctcagttttagggtttttncttttttttatagtgacaatccatagatatagacattcctaaaagaaaaataaataattcagtagatatatgtcactgttacctgaatatggaatgaatttgatgttttttattttgttgagacagggtcttgctctgtcacccagactggagtncagtggcatgatcacacctcactgcagccttggcctctcaggctcgtgatcctcctgcctcaacctcggcaagtaggcttggggactacagggcgtntgccaccagtccnggggtaattttttgtaggatataagggtctca

SEQ ID NO: 8391 - DNA, 244 bp, Homo sapiens
  misc_feature (1)..(244): n=a,t,g or c
gtggcacacaataattttaatataacaattatgattattactgataatgtacactaagttatattagaattataggagtttcacataattttggaacatacaccaataacatatttatacaaatacagcccaaagaaaaccaaacaccatttcacatttgacaatgcttcctatataattttnataccaaataggccaanttatgtcattttagggnctttaggggaaactaagntcttaaagg

SEQ ID NO: 8392 - DNA, 272 bp, Homo sapiens
  misc_feature (1)..(272): n=a,t,g or c
taagatnantactcaacaacagcaaaatttattcttctcaagtgcacatgaaacatattaccaatacagaccatattctgggccatgaaacaagttttgatatgttttaacatattcaagtcatataaagtacattcctttaccataatgtaattaaattagaagtcaatagcagaaagatctctggaaaatgtccaaatatgtggaagttaaataacacagttctaagtaacacaaaaatcataaactttttggntaatanggcaaaacgg

SEQ ID NO: 8393 - DNA, 479 bp, Homo sapiens
  misc_feature (1)..(479): n=a,t,g or c
gtatagagcagaaaatggatagtcagataaagaagcagactttcacaatatcatatgttaattttgtaatgagatagttgtttagactagtaaatagatcagggttaaaggctttgattgaatcagattatgaaaggtgccaaacacaaaggaccgtccaagtctaacacttacagattcagctggtaaagaaataatgaactaattttagattcagccagattattacttatatacatagtgaagaanagagaagctaaaggtgtcagccctatgagtccttatcccaaaccaaaaggntggcactgaaacaaaaggggtcagatggcttcagcaaggagttgtgatacaccctattgctggccagtcaattccagactggcagctaantggctatagagctgcagttctgccctacgggngcctaggggttaagttgggagtctcntgttcccctgggccnggggtttatatcngtt

SEQ ID NO: 8394 - DNA, 418 bp, Homo sapiens
  misc_feature (1)..(418): n=a,t,g or c
ctntaattaaccagatgatactctaangaaaattggancatacatatggtttcctataaatgatcctgtgcaatttgaccttttgaactcttagatttcttctttgctagataggagtttggactagatgatcttgaaagttccttttaaatctatatttctttagtgatatatcttgtatctaatcttcagaatgttcactctcaaactaaagtcatcccattacatctccttggaaaatcaatgggaaatcccttattttagaagaggttcaacaaacatgaagtgctatttgaggatgttcctggaaaggttaaataacttgaaagggttataatttcactattaaccngggcaaactcttccngggggtnctccttagggataggtaaaataccatggaattaaaaataaatct

SEQ ID NO: 8395 - DNA, 396 bp, Homo sapiens
  misc_feature (1)..(396): n=a,t,g or c
ccatcagccagtcgtcagggnntccgggtcagctggttgacaagcagcctagtacctcccctcctttcccatccctaaaccacactggcttcttttttccaaaaacattacagctcatctttaagggtgattcatgatactttctaaacagccacagtagctgaaacattggactactggggaaattccagccttgaacagactttggttttcattccagttttactaatttgttctctaatcttacaagaaattaggaccatgtgtgtgggcgcatgtagggctgtgaggtaattttatctttgccaagctcatacttgggcattatagtcagtggatttctgtggtccatggctgggctagcctggggcttcagaggggactgttcccctaaaa

SEQ ID NO: 8396 - DNA, 223 bp, Homo sapiens
  misc_feature (1)..(223): n=a,t,g or c
catatatnnaatantaaaaatcctgggaggcattgcactgtaatagtaagtctgcccatccaggntcatgcatgtcttttctttcattcaagtcttattttatatctttcagtaaattttcatatagatcttgtgaatcgaattatttttacatttcaaattcaactaacaattattaataganaatgaaaacattgatttttttcaatatttattttgtgtc

SEQ ID NO: 8397 - DNA, 472 bp, Homo sapiens; identical to SEQ ID NO: 4731
  misc_feature (1)..(472): n=a,t,g or c

SEQ ID NO: 8398 - DNA, 304 bp, Homo sapiens
  misc_feature (1)..(304): n=a,t,g or c
gaggtgtccccaacaattttattataaataaaaacaagactcccagtgggtggctgcagcccctgcctcggtggctgtnagcacctnttggaggggcctgcccttaccctggtctggaggccagaaccgaggaaagggctncctgcccctccaagtacacaggggagcctgaggtactgagaattaaaaaccagggagggactcccaggccaggcggcggccccgggccctctgccccacgaggctcatcccttggagcacacaggaagttgcccgtccatnacaccacacttttttncagncg

SEQ ID NO: 8399 - DNA, 203 bp, Homo sapiens
taaaaatatatacttttttattgttaagaaacattttcataaataagtacttatttcattccttactgaaatggctttttttttactgacccattgaaaccatgttggctatgttcaacataactagagatatctttggcgttttcctcccttagcttcatatcttgtagaacatcttgtacaaaaaagtagatttacagaaa

SEQ ID NO: 8400 - DNA, 277 bp, Homo sapiens; identical to SEQ ID NO: 4735
  misc_feature (1)..(277): n=a,t,g or c

SEQ ID NO: 8401 - DNA, 415 bp, Homo sapiens; identical to SEQ ID NO: 1783
  misc_feature (1)..(415): n=a,t,g or c

SEQ ID NO: 8402 - DNA, 386 bp, Homo sapiens
  misc_feature (1)..(386): n=a,t,g or c
ttttttttttttttgagacggagnnngcttctgtcgcccagggtgcagtgcagtggcacgattcatggctcactgcagcctcgacttcctgggcccaagtgatccttgcacctcagcctcccaagtagctgggactacaggtgcatgccatcacgcccagctaggtttttaatttttgcagaggcggtgtctccatatgttgctcaggttggtntcaagcaatcctnttgccacagcctcccaaagtgctgggattacaggtntgagccctgtacctagccaactttttctttaagaccctttctctttcattatttgatcaaaaacaaatctgactttctctgaacttctgaacaggaaataaaatggaatctcctactacattg

SEQ ID NO: 8403 - DNA, 177 bp, Homo sapiens
  misc_feature (1)..(177): n=a,t,g or c
ttttgatganggnngtaatcaatcttttattcacagctacaaactttaatcaattatggataaaacacaaaagctttttgaaatgctgataaaggaacccataccngagagaccaaataaaatccgagtnctgagctggccatggntttggcaggtcagcagcacatggaggcacag

SEQ ID NO: 8404 - DNA, 378 bp, Homo sapiens; identical to SEQ ID NO: 5461

SEQ ID NO: 8405 - DNA, 421 bp, Homo sapiens
ttttaatgtaaaaatcaatttattatacaacaatcatagataatgctttttatctacaaagaaaaatggcttctgcagcctccctgtctactccattcatgatactatgttcttaagatataattactttcaaaggaaaacaaagcgatatccatattttccaaacaaggaagcccccagacacatttatgaacgatatggaaatattggaaagaactcaaatggactcctagatacaaaaggctgttctgcccatcacagtaaacactgttttgccttaaaataaaaataataaaatatttctcaaatgcaggggtgaggactttaccccgtaacatgcctaagtggttcgatatataattttgatggcttgacaattgctatgtttaattcccattcagttaacattcccattttggta

SEQ ID NO: 8406 - DNA, 227 bp, Homo sapiens
aaggatagtcttcactatttatgtcaggaattcctacaaactttctatggtgaacagaatagagcttcctagcagtcaatgcaaagaagaaacacaacaattccacaccccaaagttaacagtcttgcttatcagaagcacaggtagttctgaaatctgatagaaaatgttcctgtatcatttcagaacacgcaactatgtgatcaaacccctttctatttgtttaa

SEQ ID NO: 8407 - DNA, 213 bp, Homo sapiens
gaggtttctgaacacaacctttatttgatcattttagtatatatttttttgcccattcgtatatttatttcaccaggtcagaatacttacaatgcatcaagcttcatgtgaattaccaggaattcacaaatgtataaaatatcaaggaacttagcatctaatgagggagacacatgtaaataaataaagtttaacttacgtgatacataaagt

SEQ ID NO: 8408 - DNA, 286 bp, Homo sapiens
cattatttgattacagatacttatcagcttaaagactttatatgctttagattaattgcacaacttacatatcagggtttctgattgaaaggaagagaatattcctttcttttagtgattgcttaatattaattcataataagtgcaccatctcttgctccttataaatgtgtttagaagaaggaaattgagtgttgggaattaagcaaccaggagacatttttatatactcctacagtgggggaagacttcctattttctttcccaaggatggatacatttctac

SEQ ID NO: 8409 - DNA, 267 bp, Homo sapiens
gatttaaaaatttttttattcaaatattaattttatcaaatgaaacaagaatctttgatgatactttgatgtaaaaaaatgtttcattcatgtgtttgcactttccatggtttaatttgtttagggtaaattgtccaacctgaaatataaattatccctttgcttaatatactctttatttcttcagaaacaaaaaaaaggtaggaattagttcaaggatgtcaatttactgtttctagtactaaagtacggctaactatgtaattt

SEQ ID NO: 8410 - DNA, 172 bp, Homo sapiens
  misc_feature (1)..(172): n=a,t,g or c
ttttccaactnggaatcgtttaatgtgtctacttcttccacgcataattataaaagaataagaatcgacaaaaatattttctttccataatatgtagaggtggtttgtttcttttttttttttttcttttctttttacttttttttttgcccgcccctggcagagctcttgg

SEQ ID NO: 8411 - DNA, 433 bp, Homo sapiens
taatgcgagttagccttttatttcatgcaattgcatagcatttggtttgatatactattagacattgtgtaagactctattatgaaataaatcatctcaaaataacttttaaaaaagcaaatctgttcatctcttctgactcaaaaggctgaaggtgaatccaaaggtactgctaaatccaagtactaaaatgctgtagtagaaatatttctatatcttggctctgctttttatacttttctttgtgtgttggtttcattctcttcaaacacagacaggctttctttatctggcagtggagttgggtcctggcacctctccttgagttaggaacctaagactttgaacccctctgtaggcagggaaaatggtggtgctatagacttggccacgactggccagggtccggggtcacgtggttatggctgcagca

SEQ ID NO: 8412 - DNA, 440 bp, Homo sapiens
aaagtcattttattggacacaaatgctaaaaattagaaaaaccatacattttactctatcaatctgttaggaaaaactatagaatatgatagtgattgcattgattctgcttagcaaattaaatgcaaaactaagatattcaccaaatataaaatatagttattttctaagaaataaaactcacacaactgccatttttagcagaatggtggcaactgccatttttagcagaaaccaaaactatttcctgttaacaagaaggaaaaaccatcagtgaacactcaagtaataatcaggggactaggatggactctcagtaagaaaccactggaatatacctgggactaaatctattctaacaaaattaagtataccaaccggaatagttttgtgtgtgcatttggtttttactatatacttttataatctcaaaagtacct

SEQ ID NO: 8413 - DNA, 490 bp, Homo sapiens
  misc_feature (1)..(490): n=a,t,g or c
ataaggaaaattgtttaatcagtgtaatcttatatgaaattaatattgaaaaaaaggaatgttttctctttacaaaagcatctacaagaattatacgaaaaacttccatgatatactgaaatatataggtccatttaaagtttttgatttataaacaaatcatcatgaatacaatttacaagtaaagtaaaaagttagaactcagcaattgagtttcttcagcttggattagtggtgtgacagtattgcctctgctatgcagancatagttttcctttgcattttcccaggctttctcacagacacagccaccttatctgtacccacacagaaatgctttgttatgtggcaacctgcaattccccagagcaggtaaggccaagctcccttagaactgcccatttgacaagccaatgatattaaagatggctctcgcntgggtccccactccacattttgcacattcctctaccataacacccacatacgt

SEQ ID NO: 8414 - DNA, 285 bp, Homo sapiens
  misc_feature (1)..(285): n=a,t,g or c
ggtgagaaaaggcttgtgattttatttaataataatttcaaaatcaaagtaattagaacaagtctagctttaactgaatgccagagattactgttcactgtgaaattgttaggataagcctgtatttcnctttttctcctttgatacagtttagcaagagcttaatcatcacttggtcggtgataagcaagcatcttgacattttgctcataccagaatttatgagtagctacagaaagcatgcgntttgtactttgcttcaaatatgggtcatccnataactat

SEQ ID NO: 8415 - DNA, 417 bp, Homo sapiens
  misc_feature (1)..(417): n=a,t,g or c
aagagagagagggacctcaggaaattaaatgtttcctatttctacattaatgctgtgtataataataattcctttggtgcccatatgccaagcggcaatatagcaatgggcaatatataaaatacacgggtccttgtaagtatattttcttttctctgtatttaaaattgagattctaacgtacagtttgcaagtgagagatttctttattgaaagtaattatcaactttttcattttttactttgataaaatcctaactgaacccattgccctccacctagcatgtcatgttatgttgtctattccacattctaaatagaggcaaaatctcagcactttttaaagtgcaagttcaatttctttgcattttttcatgctgcttccnaacatanagctgtctaagagagggtaatgtg

SEQ ID NO: 8416 - DNA, 420 bp, Homo sapiens
  misc_feature (1)..(420): n=a,t,g or c
ttttttttttttttttaatgtttcaaccattaactgtttattataataataatgnaaataagcttttgtatctaaaaggatactatatggttacaaacatgttacctatcgcattaattttactaatccccttttaaccttcctccatatttctttcaaagatatttctcatactatctgtttgagtctatcaaatttctctgaggtactcactcattttcaagcaatgtatatcagaatttgaatgntttataacaacatgactaagcaagatgntactaaaatccatatgggtcagtaacatacaanaaacctggatgaaattattttttaaaaagattatattcccacaggagtttcagtttccnatttccttaatctatgtatttatatacntacatacaatatagaaaaggttga

SEQ ID NO: 8417 - DNA, 349 bp, Homo sapiens
  misc_feature (1)..(349): n=a,t,g or c
tncacctttaaataaaaatactttattcattcctgataggttatcaaaatgtacactgttaaccaagtaaaaatggtatgctgaaatagttaactagggcatatttgaagaatttngtttacttttaaaagaggaaaaatcacttccaatcttcccttccacacattcctaacaagcctgcactatacctgcttaaaactgaaaatataaacaattacatgggccccacttcattacagaatgcattttcctgtactcttaaaggaagctattacattngaagttaccttcctttgccaaaaactttcagacaagtttacngctcgtttatattttgtgtaactttgta

SEQ ID NO: 8418 - DNA, 271 bp, Homo sapiens; identical to SEQ ID NO: 2581

SEQ ID NO: 8419 - DNA, 448 bp, Homo sapiens
  misc_feature (1)..(448): n=a,t,g or c
tttttacagcctaatcattttattgcagtatctcctattatagatatcatgctctgatgcaggagagttttggtaattaacataaagcgctggtacagagacttgtatcattaagggaaacagagtcaagagcttggttagcaacagtttcttcaagtgactgagcccctggaaggagcatgaaaaaaacatcataattatgtttatgatgcaaatgctaagtcaaagtagcaatgatatgatctatgttgtagcaaataaggtataacaaagtcttcacagtataaataaaatgttctaaaaagaaacaaatattcaacctgttaataaattggtgaaatgtatacagataaaaatggcttatcactggtacaatgatatcaacatggacagtccacattccatacatgggaactcgtgatttttaacatttgccaccaaaaagtan

SEQ ID NO: 8420 - DNA, 207 bp, Homo sapiens
tttgagctgggaatgttggactccttttaattctattccaatcatttcctgtatagggaaattaaagtcaatgcatcaaatgaagacccaaagaaacatttaaaaacttgtttgactagtattcagtatgtgagattattaagtaataacttgtccacctagttaaccttgtcctggaaatatatataggttatttgtagccgccac

SEQ ID NO: 8421 - DNA, 425 bp, Homo sapiens
tttatgatctgacatttgttttattaaccattagaaaagatttgaaaaaacgaattccattttaatagtgagacaacacaatagagctaatcatggaatattaatgttttgctattcgggaattactaagggggaaatttgcaggaaactttaaggcaagaatattgcaaataagttgccaaaaatatatgcttatagccatagcaaaatgaagatttagcatgcttgtctttgctcccaaatatttttaaatgcagctttattaaactataatgtttttaaaattaatacttgtgcttatataaaattcagtgatttaagtacatgatactcatttggtcacattttctgctattactgttcggcttcccaagaatttcattcaatcagcaagtttagttcacacaaacgttaaggcacagagt

SEQ ID NO: 8422 - DNA, 386 bp, Homo sapiens
gtttttttttttttttttggcagagacaggatttcgccatgttggccaggctagtcttgaactcctgactttaagtgatctgcctgcctcagccccccaaagtgctgggattacaggcatgaggcaatgcacctggccaattcttattttctaattttaataacatttctttctttttcttgccttagtgtcctggtaagactaccagtatattgttgaatacagatgacagagtgatagatgctataaggtgacagtgaataagagtgatagggcacgcttgtgttattccatacatcagagtgaaagcattaagtatttcaccattcaacatggcttgcacataccctttgtcagattcaagtggttacctttccatggtagtt

SEQ ID NO: 8423 - DNA, 482 bp, Homo sapiens
  misc_feature (1)..(482): n=a,t,g or c
acatttctagcagctttatttgtaatagccaaaactagataaaacctaaatgcttataaacaaatggataacaaatagtatatccataaaaaatataccactcagcaataaaaagaatgaccaccacatataagctccattgaagaatctcaaaataattatgcatcatgaatgaaactggaaaaaaagacattttattaataaaatcatatattatagaaaatacaaacaaacctattataaatgaaggtataaatcaatggttgccttgagggccagagnngggagggagagcttagaaaaagggcctgaggtaaatccgaggtgactgatatgttcnttggtaataattatnatgatgggtataatggtgtttttgactaggtttggtaacccnacattaactcnccttccngatgaccctggaggggaccccttggcctccaggtgggggccgccaaatactggggtaatccaatgga

SEQ ID NO: 8424 - DNA, 447 bp, Homo sapiens
  misc_feature (1)..(447): n=a,t,g or c
actaaattttgtgtttcatttattagttcatagcatttggcatttattttactaaaaagatgctgtggcatttccaatttaagtttaagaatactttcatagtattatgatgtaaattatgctataataagtaacgttcctttaccattaccacaaaataatctaattatagcaattatttattggtagctgtgaaaattttctcacaaaatgttaattgctattaaagtttaatggttcattatataaatataatttaaatatattacacattccaagataaatgtactacacaatcacattatttctgcccaaatatttgaaagataagaanaccatatatcctgatcagggaaacctaaaatggaaaaggtcnccgagtgagaaaaattattttaatccattggaatgcnagggagtggaaaagggaaggntataacnagtccc

SEQ ID NO: 8425 - DNA, 492 bp, Homo sapiens
  misc_feature (1)..(492): n=a,t,g or c
tttattgacatatcactttttattttcagactcctaattcatattcattattaaatagttgtgtgattcatagcagaagcatttaattaaattttagtgaaatggtctttcttagagccaggaaaattctttattccagaaatcaaaagacgatttcctcaaacatcagaatgaatcactaagtaactttgaaccaagataaaatagtctaccattatgaatccttttgaaatacaggtgttccctctccccattttaacaaggcttatttaattaaaacttttggaaaattagtaaactgatagactataaattaataagctacaaataaatagctccaaatataaacaggtgtttgaaaattatatacagtcagtgtagtttcttgatataaatgctaacactgctttgattanataagatcataaaagctagagaaagacacgctattaaggaaaccaataattctccttatattattctcacttaggc

SEQ ID NO: 8426 - DNA, 551 bp, Homo sapiens
  misc_feature (1)..(551): n=a,t,g or c
gtatttataatacttttattaagtatgaactctctgatgtgtaatatgtgagcaaatattaatgacttttccacattctttatatttgtacaccatttcncaactataaatgctttcctgtacaataagttgtgaacactggttaaaagttatattcttcacacttggagttttctccggtataaattattttacctgcaatcaagtgtgaaaaccatttaaaagtttttcatgttctttatatttcnagagttttgcactagtataattntttttatgnttagaaaagtttgaggtattgttaaaagcactgtgacatcattcaggattgtagtttcgctccagtatgaaacatcttatatcngttaagaattgaggacttatnaagggctttgtgacattcttcacacnttaggatttctgtccagtanaaattatgtgtaataagggttgagaacttttaaggccntggtcacatacttcatanttgtaggctttanctccacatggngttccccaggtttaggaagagttgagaactgggcagaggc

SEQ ID NO: 8427 - DNA, 445 bp, Homo sapiens
ttttccattcagggtattttattttcttaaagtagacaacctttgactttcatccaatccccagcttctctttcccccgtacatctcttcacgtccttggctgtgattccgcacactgacctcggacacacagctactgcacggagagagggagggagatctggcaagggctccggcagtgcctctccttctccatggcgcagtttgtatttacacacggcccttggcgaacgtcctttcaacgcagttgcccataggccctgggacaggaaggcccagatcagggtcccagcagggcctccctcaggccacaacgctggctgtgccttcacaggagtcagagcatttccagccagtctcaggcgcggggcatgctgggaccaggggcacaccccttgctccccttccttcactcagcaaagccacaaataatttactctttaaa

SEQ ID NO: 8428 - DNA, 383 bp, Homo sapiens
  misc_feature (1)..(383): n=a,t,g or c
aaaggactatgattttaatttattaaattgctaggattggtagttttggtgtcattaaaataaataacatctccccttgttgctttctttttggttgtnctttttctgcaccgcgaaggaaatacactgactattcatagttctcagtctcagaatgaggttttgcagcatctatacttttcagcatttcggttacatgatgctttcttgctttgtgcaaaccttgtagggtacctgggaaaaaacatccacttgaggtcattgccctttacagctctttacaattacatcagttttgaaggaacgccatttaaatttggtgtcagtgctcagcaagtgtaaggncgcagagtggaccagcagaatgcttacaagtcttttca

SEQ ID NO: 8429 - DNA, 394 bp, Homo sapiens
ttttttttcattcaacaaacatttattaggctcctactgtgcgtcgcgctggaaaggcaagcagaagctagattcccaatcgatcccgggaggctggacgatccagacacaaacaccgttcatgcgtctattcgaaaaggccctcttggaattttgtgcacagcatttccttggggtgtcgatggatcggggtctgcaaacattagcaccttttccggtggccgccgtcttctcagacctcagacaccggcgcctccccgtgaactcccgcaggcgtccctagcccagggcttggcgggcgctgccggttgtacctggcctaagccacgctgggccgccagcccggggcgacaccttcttcggacggcggggatttgcggctcgggtgaccgga

SEQ ID NO: 8430 - DNA, 331 bp, Homo sapiens
ttcaaatggaaaaacttgtggtatattctttggaggatatactaggacctgagaagcaacatgttcctggttggtaggtccacaaaaaatttaaacatgtagaattttatggactgacaaaaaaaattaccaatttaagtgatcaatatattaatggttttcagagtagtacccgatatttgatgttcaaggttcatgcatgtgtatttttaattccttaaactagacagcaaggtataagtcaccattctcctctaatttttgaaataatcttaaactgcgcaatccagattctcgctctccatttttccacaaaataatgagatgatca

SEQ ID NO: 8431 - DNA, 425 bp, Homo sapiens
ttttttttttttttttttcaggttttcaagccttttttttattagaaagcttaaattattagctttttttttaaaagggagtagccaatatccatttttgagttttctcaaacaaataataaggatagcaaactaggataagaaaacacattagaagacagccttctacttcgtacaacttctagttaccttttcctatccattcacctacttctgttcagcagcaagaaaaaaaatccatttatttttgcctttttggatttttccaagataaacttcatttacctgaatacaaacaaaagctagggagatggcttttatattggcatagaccaaggacatgtctcacaaaccaggaaaccctgcctcgtatggcttattttgcagtttggagtccaatggttataaaaccaagtgaaagtcga

SEQ ID NO: 8432 - DNA, 277 bp, Homo sapiens
caaaaagacttatttacaagttgagcatgtcatctcaattcatagcatgtagaaaaagctaaaaatgttttggagatataaatttggctggacgactcacctacagtatattcagggatgtcttctgtacagaatatatacaggttgggactggcaagggaaatcctatctcaggaaggcgatgaacaccaccacagagccacagacccttagcaatgttccctggctttcatttgcagttggccttgtctctggacagagtttgatgtgctgggac

SEQ ID NO: 8433 - DNA, 281 bp, Homo sapiens; identical to SEQ ID NO: 4500
  misc_feature (1)..(281): n=a,t,g or c

SEQ ID NO: 8434 - DNA, 473 bp, Homo sapiens
  misc_feature (1)..(473): n=a,t,g or c
gtggctttaaaaaacacagatttattcttttagaattttggaggctggaagttcgaaataaatttcagtgggctaaagtcaaggtgccagcagggtcattccttctggaggttctagaggagaatccattttcttccctttctatctacaggctgtctngcattccttagtcatgtatccaaaggcccttttgccatataaggtaacatagttacaggttctggggattagagaatggatacctttggaaggcattttttcagcctcccacaggggactttctcattcaccttgagaaacataaatagttgttgaaaatgcatttcagttacctccttcacctctgctcagcccttttctcttccccttgggtgggaaagcaggtctgcagagacccaggggtcctgagatgggtagaaggagaagaccccacacagaggcgctggggcacatgcacccaggccactccttgc

SEQ ID NO: 8435 - DNA, 469 bp, Homo sapiens
  misc_feature (1)..(469): n=a,t,g or c
gnaccgccttccgctcgggctgtccggcggcggctgctaccgccgcgtgtccgtcaagggtgccgcgggatgtgtgtcagtttacgcctctgagatcacacagctgcctggggncgtgtgatgcccaaggaagntcttggttttaattattattattatcattattgttacgcttggctttcgggaaatactcgtgatatttgtaggataaaggaaatgacactttgaggaactggagagaacatatatgcgttttgtttttaagaggaaaaccgtgttctcttcccggcttgttccctctttgctgatttcaggagctactctcctcctggtgaggtggaaattccagcaagaatagaggtgaagacaagccaccaggactcaggagggaaacgctgaccattagaaacctctgcataagacgttgtaaggaggaaaataaaagagagaaaaacacaaagatttaaac

SEQ ID NO: 8436 - DNA, 487 bp, Homo sapiens
tttgagatggagtctcactgtcacccaggctggagtgtagtgctgcgatcctgactcgctgcaacctccacctctggagttcaggtgattctcctgcctcagccttccgagtacctgggaatacaggaatgcaccaccatgcccggcgaatttttctattttcagtagagacggagttttgccatgttggccaggctggtctcgaactcctgaactcaggtgatccacccgcctcagtctcccaatagattagatatattattaatgaattgcttcctttaacaccctattcattgaattttccagtaaaccacaattactaattactcctgaaatcagaaaagaggttaaaaagattttataacagtatcctatgaaatctactactttcaagtaatagtagttgaattaccaaaacccgtcactcaagccaatgactacaattaagatatgagtaacatttcctaagataataaagtcaattaat

SEQ ID NO: 8437 - DNA, 263 bp, Homo sapiens
  misc_feature (1)..(263): n=a,t,g or c
acaacacattttatttgcaaaaactcagctaagagatagtntggagctgccacnccctggggggctgagctgaggtgggtcatgagagagcttagtcatgttggccctgggtngggcaggggtggtggggacagggngtccagtgtctacctcacnctacccctaatactgatcagagtttggtcccagctgggccaagggcaagaagagagaacgaggccaggccaatgtcttcaatcccagcggctaggaacccttcacct

SEQ ID NO: 8438 - DNA, 470 bp, Homo sapiens
  misc_feature (1)..(470): n=a,t,g or c
tttttttttttttatatagctttaatgccgcaaaatatttatttttccttaaaaaaggtgtcaacttggaaataatggtttaaaaacaggataagcattaaggaaaaacactttcaatgtgtcttccatttgatgaatttgtttttctctctttatccccgcaagtggagtttcatgtcctcggtgaaaccagacagtgtgaatctgttccagcccaaatctgcagcattagggatgagttctcagaagtgattctgaactgagcacgcactcatgtctgcatggggaactctggggagaagagccttccttttctttcccttgggccatttgcctttccttgtcgtcttactgagggcggaggcagggagggtctctgtnctttccagggccctgggcagggccatcctggccattcagggaaagatgggaagagttagggnctccgttttaggcagccntgggtggga

SEQ ID NO: 8439 - DNA, 438 bp, Homo sapiens
  misc_feature (1)..(438): n=a,t,g or c
gacatggagtctctcactgtcctcaggctggagtgcagtggcgcgatctcggctcactgctatcacttcctttgaccaccagagaccagcccagccgttagccagaagggcctgggctgttcctcctgcctgggaaggaagactntccacacccttcaggtacctcctcagtctttctcttagaggcctccccggatgtccccacactaggccaggtntccctgtagacttaccacagttgtaattataagtgtgtttgtttagtgcctcccccaccccatactgggactntaaagcctccagagcagggggccatgggcaacctggggtntccagtgctgggacgcctggggagggtatttcttcttcaatattttctttgaatggaatttcacaaatattttaatggatattaaaagggaaaaaggataaagttgc

SEQ ID NO: 8440 - DNA, 431 bp, Homo sapiens; identical to SEQ ID NO: 1918

SEQ ID NO: 8441 - DNA, 336 bp, Homo sapiens; identical to SEQ ID NO: 7920
  misc_feature (1)..(336): n=a,t,g or c

SEQ ID NO: 8442 - DNA, 465 bp, Homo sapiens
tttttgaaggcacacaaagctttattggctccgttccaggcaatgacatcagtgtggggctcttgcctgctcccatctgtcttctcttggtgggtcttcaggggcctcagggtctatctcacctgcgctgtgtcctcccagctctccctccaacaggggccatcttctgtggcagaccccactcatggagtttaaagagcccataatccccgtgaggagcctaagaaagtagggatttgggcacagcatctcaccctggcctgcatagatggccccataggagagaaaacagacgtgtgtgtgagccagccttgctgggggcaggggcgtctccatccatggttaggtggcttccaagaagtcacagatctagtgtctgcgattaggcaggctgtggctctggtggcttgggtggccatggtgactgtggtgactgtggccatagaaggtgtgtgtgtgattggc

SEQ ID NO: 8443 - DNA, 437 bp, Homo sapiens
tttccataaaaagcactttgtttaattttatcaaatcgatctgtacaaaagttagcgttgcttggtcagaaaggagtgaaggcagcaggggagtgagggtgcgtcctccgaacgcggtgccaagggagacgctgcatgaaacgggtctgcgacggctcccggcccccacccccacccccagagaaatagaagcagaggcattatcttttttttctacaaaaaagtaggaaaagtagaaaaagtacaaagaagcaacttctcggctgtgtttaagtttacaaagtttaaaggcacaagtttccgtgaagtaggcgctattgtatgctctatgctcagcacacaggggaagcagtgcaggtgaatcaggtatgactcgtctagaactgaggccctaacgacgtttagtggagaaggtttagtttcacagcttggtaggt

SEQ ID NO: 8444 - DNA, 367 bp, Homo sapiens
  misc_feature (1)..(367): n=a,t,g or c
gaatgctctnacctttatttctctnaatatacccgtnatacagatatttnatatgtaacaaagataaggacgtgtgcaggtataaaacagaggcagantcatggctaaaacatctagcccagcaatganctcattatccctgaggggtaggggcggggnaggagaggagtcacaggcngttcacccacacctggaaaancgatgacttcanggagaatgaatnnctcgggggnnttcagntcatgaagtcatnagaagaaggcctttcttcccagggatgatgtttctcagtatcaataatcagttgtgggtttttttcttctatttcttccagcagctttattgagttcatcattaaagtcatcta

SEQ ID NO: 8445 - DNA, 5588 bp, Homo sapiens
ccctcttccttacctagtcccttgtctaattgatcgtgtaatagtacacttccccagacaagtccacactaatataagaaccaaaacatccctccccttctttttttggcaacaaggaaaactacccagacctgcgatccattgccgaaaccctctctccagagccctcatccttccggtctgtgtggaattccgaattgaatcattcagtttggtgctataaaacccatacctaaagactcgcggttatattatccatgaagaatcccaacaacactcttaacttctaataattaatatttcacggacccaaccacgaaccggtagtatttgttgaggtatttacgagcgaaaatgacagcacctatgtgcctccaccctctgggttaacccaagggcgggtacaataacccggggtgccgatataccagaaatgccgaaggatcagagaagtggtagagattccaaacaaaggagtagacttagtgtccactcactaagagtcccactgagttctcccgaccacgtcaccgtctcgtacccttagctcccttccgcggaaggacagtctccgttgtgtgggtcaccctcctaggacgggcgagacgagagaggatggaggggaagggcccgatttgcgaccccagccagaccgtcgataaggcccttagactcgcgcctaagactgtttcctctgcagaaggtggctggtgtagtgtacctcgaggtttcgtgctcgtgccggagggccccgacactggagttccgcctcggggaccactggagtccctctcaggggtgggggcgtcgggcacggggccccgtcccgcccccgtccctctcccccgccttagccccgccagggccctcgcggggcgggggaggcggaggcgtcgcaactggacgtcgacagccgcccgccaccgagagatcagctgtcagagatcagaggaagaggaaggggcggagctgctttgcggccggccggagcagtcagccgactacagagaagggtaatcgggtgtccccggcgccgcccggggccctgagggctggctagggtccaggccgggggggacgggacagacgaaccagccccgtgtaggaagcgcgacaatgccccgctacggagcgtcactccgccagagctgccccaggtccggccgggagcagggacaagacgggaccgccggagcccccggactcctttggatgggcctggcgctggcgctggcgctggcgctggcgctggctctgtctgactctcgggttctctgggctccggcagaggctcaccctctttctccccaaggccatcctgccaggttacatcgcatagtgccccggctccgagatgtctttgggtgggggaacctcacctgcccaatctgcaaaggtctattcaccgccatcaacctcgggctgaaggtgagcactgaaggggctgcagtggaggaggccgaaaggagtgctggggctgggggctggggctgatgctggtgcgctgggctcagaatgcatccctgatggagagggtggcatctacaatccatcactgagtttgctcccctttggggacacccatggctacatgccaccatcaccccattgtgacctttgtgaagtaagaaataatgcagacagtgcctgaggaagtcagcttgccaagcaaaggcctcatgccacaggccgctgagctaaagaagaagcgatggcctggtgctgcctgagttacagggcaatatctggaaggcaaaggtgtgcactgagcttggtgcactgagtcctgcccagccccagtttggaaatggaggccaaggggtggtggccaggggttggcctggttcctctgctctgcctctgatttctcaccatgcgctcctcccactgcagaaggaacccaatgtggctcgcgtgggctccgtggccatcaagctgtgcaatctgctgaagatagcaccacctgccgtgtgccaatccattgtccacctctttgaggatgacatggtggaggtgtggagacgctcagtgctgagcccatctgaggcctgtggcctgctcctgggctccacctgtgggcactgggacattttctcatcttggaacatctctttgcctactgtgccgaagccgccccccaaaccccctagccccccagccccaggtgcccctgtcagccgcatcctcttcctcactgacctgcactgggatcatgactacctggagggcacggaccctgactgtgcagacccactgtgctgccgccggggttctggcctgccgcccgcatcccggccaggtgccggatactggggcgaatacagcaagtgtgacctgcccctgaggaccctggagagcctgttgagtgggctgggcccagccggcccttttgatatggtgtactggacaggagacatccccgcacatgatgtctggcaccagactcgtcaggaccaactgcgggccctgaccaccgtcacagcacttgtgaggaagttcctggggccagtgccagtgtaccctgctgtgggtaaccatgaaagcacacctgtcaatagcttccctccccccttcattgagggcaaccactcctcccgctggctctatgaagcgatggccaaggcttgggagccctggctgcctgccgaagccctgcgcaccctcaggtacttatcgtccgtggaaacccaggaagggaaaagaaaggtgaatgaaagtgaagggagaagggaacctggggcattgtctctgattgctctagcatgagtccttagtgctcttcatttggctcccctaatctgactcctccttccctttctactgttttgccgcaccaggctttttttttttttttttttttagtttagtttttgtagagacaagatcttgctatgttgcccaggctggtctcaaacacctaacctcaagcaatcctcccgcctcggcctcccaaaatgctgggaccacaggcatcagctactgctcctggccctcccttttttttttttttttttttttttttttttgagatggaatcctgctctgttgcccaggctggagtgcagtggcaccatctcagctcactacagcctccacctcctgggttcaagcaattctgcctcagcctcccaagtacctgggactacaggtgcacgccaccacacccagctaatttttgtatttttagtagagatggggtttcaccatgttggccaagatggtcttgatctcctgacctcatgatctgcccacctcggcctcccaaagtgctgggattacaggcatgaaccactgcacccagctttccagccctccctttctactcttatctccagccaccctccttcaaaggtctggcagcataacctctctatgccccagctgtgtctttgctcatgttggccctctggaaatgatttcccccttttttttaagtgctccagttttttcccaccttatccatcccatgtcatcttccctctgtgtggtccttgcttcccattctagctaactcttatccctcccccatactcctggagccctctgccctcagagtcttttgtgtcacacagacccaataattagaactgtttggtctctggctagactgtgagctccttgcaggtggggaagatgtcatgtatgcttttaccctccacccaaatgcccagcacaggaggaccaggattggaacaagtgttgacctctcatgtttactttgtttcagaattggggggttctatgctctttccccataccccggtctccgcctcatctctctcaatatgaatttttgttcccgtgagaacttctggctcttgatcaactccacggatcccgcaggacagctccagtggctggtgggggagcttcaggctgctgaggatcgaggagacaaagtgagggccagtagtgggaacacggtggtgctgggggacaagcaggctcctgttgagctggagcacctctgggcacagaagttttattttcctggcattcccaacaagtgttccctggggattcagctcatggtcactgttgaaagccttcattcagtccccctttctctagccagggctgcctggacccctggatgccctgattaccatccttaattctccctactaggtgcatataattggccacattcccccagggcactgtctgaagagctggagctggaattattaccgaattgtagccaggtaggacggagatgagggtgggaatagggacagggtgagtgtctgaaggctgaaaattcccttgagcatctcaccatccctgttgtcccatggagtggggaggctcctcactagaacaggttggagaaagagggcatcctatctccccagatgtcttcctacccctccctagaatcttctgaatgtagtaccttctggccaggtatgagaacaccctggctgctcagttctttggccacactcatgtggatgaatttgaggtcttctatgatgaagagactctgagccggccgctggctgtagccttcctggcacccagtgcaactacctacatcggccttaatcctggtgagtgaggcagaagggagcctcccttatcctggagttggtgggataggggaaggaggttggagccagagcctgcaaagcatgggcaggatgtgtggcccctccctggagttacccttgctccttgcccctccagtcagccccacatccttgcaggttaccgtgtgtaccaaatagatggaaactactccgggagctctcacgtggtcctggaccatgagacctacatcctgaatctgacccaggcaaacataccgggagccataccgcactggcagcttctctacagggctcgagaaacctatgggctgcccaacacactgcctaccgcctggcacaacctggtatatcgcatgcggggcgacatgcaacttttccagaccttctggtttctctaccataagggccacccaccctcggagccctgtggcacgccctgccgtctggctactctttgtgcccagctctctgcccgtgctgacagccctgctctgtgccgccacctgatgccagatgggagcctcccagaggcccagagcctgtggccaaggccactgttttgctagggccccagggcccacatttgggaaagttcttgatgtaggaaagggtgaaaaagcccaaatgctgctgtggttcaaccaggcaagatcatccggtgaaagaaccagtccctgggccccaaggatgccggggaaacaggaccttctcctttcctggagctggtttagctggatatgggagggggtttggctgcctgtgcccaggagctagactgccttgaggctgctgtcctttcacagccatggagtagaggcctaagttgacactgccctgggcagacaagacaggagctgtcgccccaggcctgtgctgcccagccaggaaccctgtactgctgctgcgacctgatgctgccagtctgttaaaataaagataagagacttggactccagacccctgtgtgactgtcccaatttcttctttccaggcaagcagggcaaggagatctttggagcaagatcataactgagg

SEQ ID NO: 8446 - DNA, 2337 bp, Homo sapiens
gagctcagagaggagagagtgcacatgcagccgacagtggcagggcaggaccaggaagtcaggcagtgtgacttgggggatccatgcttattctcctcccacctttcggaaggcacaggaaggcaccacagtgtcgcaatttatgcacaattagtgcaaagtctcacctgtgagcttgcctggggcaaccaggggaggctgggggctccttctccaccaggccccgctgcctccatatgactcttccctgtattttagccctgtaggtaattttccagtttgtgggctcctgtaccacatgcggtgagttaaaagaacaggtgggcagcggcgcggctcccgcgtgagctgtgtgactttgagcaggccccactacctttccgagccgcatttccacctgggcgaagcgggttgagccggcctggcggggaaagattcttttaacgggggaacaacgtaaggcgtgcaccggggaacacggatgctgctgagtcaatgcccgctctgccgttctctttgagagtaaggcttgcgtctcgcctgctctagcgccccaggtttgaacgcagtgggcgcgcaggaggaaacatagattcacgaatgcaatgccagcaaagtaaaatttttcacccttgtccgtttttcagggtgtttcaagcggaggagtcctgagtggagaagattccgcttccctgttttcaggttctggcagtcatggaccgggaagagcgagtcggggcgcgggtccctggcggtcgctggaacccttgtgagtgaggttggtgcccgcgagggcacagcgggcgctcgggaagtcgcagccgccggcagagggcgccccgggcacacggagcgcgcggcgctggggttggggcgctcgggaggtgcggggcaccggctggagtccggcgttgaccgcagccgggacgcgcccgccacctgggcggggaaggagtgagtcccctcggggcgcagcggcgcgcgctggcccggatcccagctgcgccgcgccctccctgcgagcggtgagtacaggcgcccacgggcatctccaaccctagttaggggacacttggagacaacgcaggtcggacgtccgccggccgttctaggagttggtgtgcggggaatggggggtgctcccgctcgcttagggctttgggtccggctaggggttgaccccaagaggcgctggatgtcggggctgagctttgctttcaggggactcaagcttacttgaggttctgacattggatttgcctcgcgggcccctgcgcgtgctgccgggggatccggagactggcgaggtaaccagggagggcaagcactcaccggggcgtcctccgcccacctcgcccgcagaaccatccagggggaccacgtgcggctgtcgcccgcaactctgcctgtcaagcgaggaccgcccccagggcaggggaggggacgcgcgggcggggtgggctgtgccccgcgggaaccccgccggcctgtgcgcttgctggtgccagctcggctcgctgcctcgcattgccacaggctcctgagaggtcgcgggcagtgcctgcggggaggcgcggggccctgctctgtagggctgaaggccgcccgaggttcgccaaggctctgggctctcgaaaggaagccaagaaaagaagctgcccaggtgaccagtcctgggagtgctctctcccaaggaagctccgagcgcccaggagcccttagccggggtctagtgccctttgaacaatctccagctcttcaaggaagtgggctgccgccgcctctcttgggacctggcctgggatcctttccccaaacgcaccccggcgatttttgcgcaccgggagccgaacccctgctgcgcgcagctggctgggctcaggcgcgcttcctcaacgtttcggagccgctgcccccagcgaagtccacattccaagctccaggggctttgagagagacgaccccaaggcaaggtaggtggctcggacgggctcgccctgggaattattaggttgggcttgacgtgagtaatgatgccatctgcttaagtcttggagaaagaccgtgtgttttccttttgctttttaaggcgtttggagagctgctgaggagccaggggcttggaggagcgagaagacatgtattttcagctgagtctcagaaggggagaatctcctgtcaccaccagaaaagcaacagccccgaaatgtgattgcaactgactagcagagcagaggcccaggagtcactggattgatgatttagaatatgctaaaaagccagtgctttatttggggaattcaggggctttctggtgcccaagacagtgacctgcag

SEQ ID NO: 8447 - DNA, 748 bp, Homo sapiens
cctagcagtcaacatgaaggctctcattgttctggggcttgtcctcctttctgttacggtccagggcaaggtctttgaaaggtgtgagttggccagaactctgaaaagattgggaatggatggctacaggggaatgagcctagcaaactggatgtgtttggccaaatgggagagtggttacaacacacgagctacaaactacaatgctggagacagaagcactgattatgggatatttcagatcaatagccgctactggtgtaatgatggcaaaaccccaggagcagttaatgcctgtcatttatcctgcagtgctttgctgcaagataacatcgctgatgctgtagcttgtgcaaagagggttgtccgtgatccacaaggcattagagcatgggtggcatggagaaatcgttgtcaaaacagagatgtccgtcagtatgttcaaggttgtggagtgtaactccagaattttccttcttcagctcattttgtctctctcacaattaagggagtaggttaagtgaaaggtcacataccattatttccccttcaaacaaataatatttttacagaagcaggagcaaaatatggcctttcttctaagagatataatgttcactaaatgtggttatttttatattaagcctacaacattttttagtttgcaaatagaactaatactggtgaaaatttacctaaaaccttggttattaaatacatctccagtacattccgttctttttttttg
